(19) United States
(12) Patent Application Publication
(10) Pub. No.: US 2007/0116669 A1
(43) Pub. Date: May 24, 2007

(54) Interferon-inducible protein-10 (IP-10 or CXCL10) chemokine analogs for the treatment of human diseases

(75) Inventors: Ahmed Merzouk, Richmond (CA); Donald Wong, Vancouver (CA); Hassan Salari, Vancouver (CA)

Correspondence Address: PERKINS COIE LLP, P.O. BOX 2168, MENLO PARK, CA, 94026, US

(73) Assignee: Chemokine Therapeutics Corporation

(21) Appl. No.: 11/590,210

(22) Filed: Oct. 30, 2006

Related U.S. Application Data
(63) Continuation-in-part of application No. 11/494,232, filed on Jul. 26, 2006.
Application No. 11/494,232 is a division of application No. 10/243,795, filed on Sep. 13, 2002, now Pat. No. 7,091,310.

(51) Int. Cl. A61K 38/19; C07K 14/52; C07K 16/24; A61K 39/395

(52) U.S. Cl. 424/85.1; 530/351; 424/145.1; 530/388.23

(57) ABSTRACT

This invention is directed to peptide analogs of interferon-inducible protein-10 (IP-10 or CXCL10) chemokine that bind to the CXCR3 receptor or any other receptor in which IP-10 analogs can bind to as a ligand, such that the analogs can be designed to serve as agonists or antagonists of IP-10 chemokine. The analogs can be used to prevent, treat, or ameliorate the symptoms of, a disease.

### CROSS-REFERENCE

[0001] This application is a continuation-in-part of co-pending U.S. patent application Ser. No. 11/494,232 filed Jul. 26, 2006, which is a divisional of U.S. patent application Ser. No. 10/243,795, filed Sep. 13, 2002, now U.S. Pat. No. 7,091,310 issued Aug. 15, 2006, all of which are hereby incorporated by reference in their entirety.

### SEQUENCE LISTING

[0002] This application contains a “lengthy” sequence listing which has been submitted as a CD-R in lieu of a printed paper copy and is hereby incorporated by reference in its entirety.

### FIELD OF THE INVENTION

[0003] This invention is directed to peptide analogs of interferon-inducible protein-10 (IP-10 or CXCL10) chemokine that bind to the CXCR3 receptor or any other receptor in which IP-10 analogs can bind to as a ligand, such that the analogs can be designed to serve as agonists or antagonists of IP-10 chemokine. The analogs can be used to prevent, treat, or ameliorate the symptoms of, a disease.

### BACKGROUND OF THE INVENTION

[0004] Chemokines (chemoattractant cytokines) are a family of homologous serum proteins of between 7 and 16 kDa, which were originally characterized by their ability to induce migration of leukocytes. Most chemokines have four characteristic cysteines (Cys), and depending on the motif displayed by the first two cysteines, they have been classified into CXC or alpha, CC or beta, C or gamma, and CX3C or delta chemokine classes. Two disulfide bonds are formed between the first and third cysteine and between the second and fourth cysteine. In general, it was thought that the disulfide bridges were required, and Clark-Lewis and co-workers reported that, at least for IP-10, the disulfide bridges are critical for chemokine activity (Clark-Lewis et al., J. Biol. Chem. 269:16075-16081, 1994). The only exception to having four cysteines is lymphotactin, which has only two cysteine residues. Thus, lymphotactin manages to retain a functional structure with only one disulfide bond.

[0005] In addition, the CXC, or alpha, subfamily has been divided into two groups depending on the presence of the ELR motif (Glu-Leu-Arg) preceding the first cysteine: the ELR-CXC chemokines and the non-ELR-CXC chemokines (see, e.g., Clark-Lewis, supra, and Belperio et al., “CXC Chemokines in Angiogenesis,” J. Leukoc. Biol. 68:1-8, 2000).

[0006] Chemokines have been shown to be useful in therapeutic applications. For example, the chemokine SDF-1 has been shown to enhance platelet production (Lane et al., Blood 96:4152-59, 2000) and B-cell production (Nagasawa, T., Int. J. Hematol. 72:408-11, 2000), inter alia. Other chemokine functions are reviewed in Schwarz and Wells (Schwarz and Wells, Nat. Rev. Drug Discov. 1:347-58, 2002). Glimm and colleagues reported for example, that SDF-1 arrests hematopoietic stem cell cycling, thus allowing a better transfection of these cells with gene constructs for the purpose of gene therapy (Glimm H. et al., “Ex vivo treatment of proliferating human cord blood stem cells with stroma-derived factor-1 enhances their ability to engraft NOD/SCID mice,” Blood 99(9):3454-57, 2002). All of the above references are incorporated by reference herein their entirety, including any drawings, tables, and figures.

[0007] Interferon-inducible protein-10 (IP-10 or CXCL10) is induced by interferon-gamma and TNF-alpha, and is produced by keratinocytes, endothelial cells, fibroblasts and monocytes. IP-10 is thought to play a role in recruiting activated T cells to sites of tissue inflammation (Dufour, et al., “IFN-gamma-inducible protein 10 (IP-10; CXCL10)-deficient mice reveal a role for IP-10 in effector T cell generation and trafficking,” J Immunol., 168:3195-204, 2002). In addition, IP-10 may play a role in hypersensitivity. It may also play a role in the genesis of inflammatory demyelinating neuropathies (Kieseier, et al., “Chemokines and chemokine receptors in inflammatory demyelinating neuropathies: a central role for IP-10, “Brain 125:823-34, 2002).

[0008] Research has shown that IP-10s may be useful in improving the engraftment of stem cells following transplantation (Nagasawa, 2000), as well as in mobilizing stem cells (Gazitt, Y., J. Hematother Stem Cell Res 10:229-36, 2001; Hattori et al., Blood 97:3354-59, 2001) and enhancing anti-tumor immunity (Nomura et al., Int. J. Cancer 91:597-606, 2001; Mach and Dranoff, Curr. Opin. Immunol. 12:571-75, 2000). The biological activity of chemokines has been discussed, for example, in reports known to those of skill in the art (Bruce, L. et al., “Radiolabeled Chemokine binding assays,” Methods in Molecular Biology (2000) vol. 138, pp129-134, Raphaele, B. et al. “Calcium Mobilization,” Methods in Molecular Biology (2000) vol. 138, pp143-148, Paul D. Ponath et al., “Transwell Chemotaxis,” Methods in Molecular Biology (2000) vol. 138, ppl 13-120 Humana Press. Totowa, N.J.).

[0009] Accordingly, one of skill will appreciate novel IP-10 analogs that bind to the CXCR3 receptor or any other receptor in which IP-10 analogs can be a ligand, such that the analogs can be designed to serve as agonists or antagonists of IP-10 chemokine.

### SUMMARY OF THE INVENTION

[0010] The present invention is directed to an IP-10 analog that can serve as an agonist or antagonist in the treatment of disease. More particularly, the invention is directed to a composition comprising an IP-10 chemokine analog having a length ranging from about 21 to about 34 amino acids and comprising a first conserved sequence consisting of the IP-10 chemokine residues 1-15 (SEQ ID NO: 1646), and conservatively modified variants thereof; a second conserved sequence consisting of the IP-10 chemokine residues 66-71 (SEQ ID NO: 1647), and conservatively modified variants thereof; and, an optional linker having up to 4 amino acids. The N-terminus of the N-terminal region can consist of a hydrogen or can be modified using an N-terminal modifier comprising a component selected from a group consisting of a poly(ethylene glycol) or derivative thereof, a glycosaminoglycan, a diagnostic label, a radioactive group, an acyl group, an acetyl group, a peptide, and a modifier capable of reducing the ability of the IP-10 analog to act as a substrate for arninopeptidases. The linker can be selected from a group consisting of (a) up to four natural amino acids, and (b) any non-natural amino acid having the following structure: [chemical structure]
wherein, R_{L} is selected from a group consisting of saturated and unsaturated aliphatics and heteroaliphatics consisting of 20 or fewer carbon atoms that are optionally substituted with a hydroxyl, carboxyl, amino, amido, or imino group; or an aromatic group having from 5 to 7 members in the ring; and —(CH₂)ₙ—, wherein n is an integer ranging from 1 to 20.

[0011] In some embodiments, the IP-10 analog can have a length of about 26 to 32 amino acid residues and comprise an N-terminal region consisting essentially of SEQ ID NO: 1646 and conservatively modified variants thereof in residues 1-15, and a C-terminal region comprising SEQ ID NO: 1647 and conservatively modified variants thereof. In some embodiments, the linker is 11-aminoundecanoic acid.

[0012] In many embodiments, the IP-10 analogs can be comprised of an amino acid sequence selected from a group consisting of SEQ ID NO: 1641, SEQ ID NO: 1642, SEQ ID NO: 1643, SEQ ID NO: 1644, and SEQ ID NO: 1645. In some embodiments, the IP-10 analogs can be comprised of an amino acid sequence selected from a group consisting of SEQ ID NOs:296 through 349, 404 through 457, 494 through 548, 675 through 728, variants b134 through b187, b242 through b295, b332 through b385, and b512 through b566, inclusive. These amino acid sequences can contain variables Xaa₁, Xaa₂, Xaa₃, and Xaa₄, wherein, Xaa₁, Xaa₂, Xaa₃, and Xaa₄ can each be independently selected from a group consisting of any natural amino acid or any non-natural amino acid having the following structure: [chemical structure]
wherein, R_{L} is selected from a group consisting of saturated and unsaturated aliphatics and heteroaliphatics consisting of 20 or fewer carbon atoms that are optionally substituted with a hydroxyl, carboxyl, amino, amido, or imino group; or an aromatic group having from 5 to 7 members in the ring; and —(CH₂)ₙ—, wherein n is an integer ranging from 1 to 20.

[0013] In many embodiments, the invention includes a method of increasing the IP-10-mediated activity of a cell having a receptor capable of binding to an IP-10 analog, comprising binding the receptor to the IP-10 analog described above. In some embodiments, the invention includes an antibody produced using the IP-10 analog described above as an antigen. In these embodiments, the antibody can be polyclonal, monoclonal, and/or humanized.

### BRIEF DESCRIPTION OF THE DRAWINGS

[0014] FIG. 1 illustrates the induction of [Ca²⁺]i mobilization by select IP-10 analogs at a concentration of 100 μM according to some embodiments of the present invention.

### DETAILED DESCRIPTION OF THE INVENTION

[0015] The present invention generally relates to the design, preparation, derivation, and use of amino acid sequences in the prevention, treatment, and ameliorization of diseases and disorders. Generally speaking, this invention is directed to the design, synthesis, and use of IP-10 analogs which bind to an IP-10 chemokine receptor, such as a CXCR3 receptor or any other receptor to which IP-10 binds, such that the IP-10 analogs can be designed to affect the activity of the receptor.

[0016] An IP-10 chemokine receptor, for example, can by any receptor recognized in the art as binding to an IP-10 chemokine, as well as any other binding moiety capable of binding to an IP-10 chemokine or IP-10 analog, wherein the activity of the receptor can be increased or decreased. In some embodiments, the terms “activity,” “activate,” “activated,” “activating,” “activation,” and the like, can refer to a cellular or extracellular function of an IP-10 chemokine receptor.

[0017] In some embodiments, biological activity can include, for example, receptor binding, chemotaxis, and calcium mobilization, as well as other activities known to those of skill in the art that are affected by the presence of a binding peptide. The IP-10 chemokine receptor function can include catalytic activity from the interaction with a natural binding partner. In some embodiments, an IP-10 mimetic activates the catalytic activity of a chemokine receptor. In some embodiments, an IP-10 mimetic inhibits the catalytic activity of a chemokine receptor. In some embodiments, the activation or inhibition of a chemokine receptor can be dependent on the concentration of an IP-10 mimetic.

[0018] A recognized sequence of the human IP-10 chemokine is as follows:

(SEQ ID NO:2)
Val-Pro-Leu-Ser-Arg-Thr-Val-Arg-Cys-Thr-Cys-Ile-Ser-Ile-Ser-Asn-
Gln-Pro-Val-Asn-Pro-Pro-Arg-Ser-Leu-Glu-Lys-Leu-Glu-Ile-Ile-
Pro-Ala-Ser-Gln-Phe-Cys-Pro-Arg-Val-Glu-Ile-Ile-Ala-Thr-Met-
Lys-Lys-Lys-Gly-Glu-Lys-Arg-Cys-Leu-Asn-Pro-Glu-Ser-Lys-Ala-
Ile-Lys-Asn-Leu-Leu-Lys-Ala-Val-Ser-Lys-Glu-Met-Ser-Lys-Arg-
Ser-Pro

[0019] The products of the present invention can be referred to by various terms including, but not limited to, “analogs,” “mimetics, “peptidomimetics,” “peptides,” “polypeptides,” “designer peptides,” “IP-10 chemokine mimetics,” “IP-10 mimetics,” “IP-10 chemokine analogs,” “IP-10 analogs,” and “IP-10 chemokine derivatives.” These terms can be used interchangeably in many embodiments and, in some embodiments, denote equivalent compounds. The IP-10 analogs can include, but are not limited to, the sequences described herein, variants and conservately modified variants thereof, and can also include additional elements such as R-group substituents and linkers, examples of which are taught in the present application.

[0020] The term “variant” refers to modifications to a peptide that allows the peptide to retain its binding properties, and such modifications include, but are not limited to, conservative substitutions in which one or more amino acids are substituted for other amino acids; deletion or addition of amino acids that have minimal influence on the binding properties or secondary structure; conjugation of a linker; post-translational modifications such as, for example, the addition of functional groups. Examples of such post-translational modifications can include, but are not limited to, the addition of modifying groups described below through processes such as, for example, glycosylation, acetylation, phosphorylation, modifications with fatty acids, formation of disulfide bonds within and between peptides, biotinylation, PEGylation, and combinations thereof

[0021] The term “conservatively modified variant” refers to a conservative amino acid substitution, which is an amino acid substituted by an amino acid of similar charge density, hydrophilicity/hydrophobicity, size, and/or configuration such as, for example, substituting valine for isoleucine. In comparison, a “non-conservatively modified variant” can refer to a non-conservative amino acid substitution, which can include, in some embodiments, an amino acid substituted by an amino acid of differing charge density, hydrophilicity/hydrophobicity, size, and/or configuration such as, for example, substituting valine for phenyalanine. One of skill will recognize that there is more than one convention for identifying conservatively modified variants.

[0022] The IP-10 chemokine and its analogs can affect biological functions and can be designed to include a wide variety of modifications to provide, for example, a diagnostic, therapeutic and/or prophylactic activity in a subject. The term “subject” and “patient” can be used interchangeably in the present invention and, in most embodiments, refer to an animal such as a mammal including, but not limited to, non-primates such as, for example, a cow, pig, horse, cat, dog, rat and mouse; and primates such as, for example, a monkey or a human.

[0023] The IP-10 analogs can act as agonists or antagonists for an IP-10 chemokine in many embodiments. In some embodiments, the N-terminal region, the C-terminal region, or both, of an IP-10 chemokine can bind to an IP-10 receptor such as, for example, a CXCR3 receptor. In some embodiments, the beta sheet structure that connects the two termini may play a role in the stabilization of the IP-10 receptor and can help assure that the termini are in the proper conformation.

[0024] Examples of these analogs include compounds that contain structures corresponding to various select regions and combinations of regions within the IP-10 chemokine. In some embodiments, the IP-10 analog comprises an N-terminal region joined with a C-terminal region, wherein the means for joining the two regions is a linker. In some embodiments, the amino acid residues of the IP-10 analog can be cyclized, e.g., by etherification of lysine and serine residues or by other means described infra or known in the art.

[0025] In some embodiments, the IP-10 analog comprises a sequence derived from a wild-type IP-10 chemokine sequence but with one or more of the cysteines replaced with another amino acid, which can be a natural or non-natural amino acid. Some embodiments include IP-10 analogs comprising an N-terminal region, an internal region containing up to three anti-parallel β-sheets, a C-terminal region containing an α-helical structure, a combination of the N- and C-terminal regions linked together directly, a combination of an N-terminal and an internal region, a combination of a C-terminal region and an internal region, a combination of an N-terminal, internal and C-terminal region, and any combination thereof.

[0026] In some embodiments, the N-terminal, internal and C-terminal regions of the IP-10 analogs may be 2, 3, 4, 5, 6, 7, 8, 9, 10, 11, 12, 13, 14, 15, 16, 17, 20, 25, 30, 35, 40, 41, or 45 amino acids in length. In some embodiments, the IP-10 analogs can be 10-15, 12-17, 15-20, 20-25, 25-30, 30-35, 35-40, 30-50, 30-70, or any range therein, amino acids in length.

Methods of Use

[0027] The IP-10 analogs can be used in treating, preventing, or ameliorating the symptoms of, several diseases. The terms “disease,” “disorder,” and “abnormal condition” can be used interchangeably in many embodiments and generally refer to a deviation from a normal function in an organism. An abnormal condition can comprise deviations, for example, in cell proliferation, cell differentiation, cell survival, cell migration or movement, or the activities of enzymes within a cell.

[0028] In some embodiments, the diseases and disorders may include, but are not limited to, hyperproliferative disorders, such as inflammatory conditions, autoimmune disorders, cancers, and vascular conditions; and neuropathies, such as inflammatory demyelinating neuropathies. In some embodiments, the diseases or disorders can include, but are not limited to, cardiovascular disease, neurological disorders, infectious disease, and inflammatory disorders that include rheumatoid arthritis, chronic inflammatory bowel disease, chronic inflammatory pelvic disease, multiple sclerosis, asthma, osteoarthritis, atherosclerosis, psoriasis, rhinitis, autoimmunity, organ transplant rejection, and genetic diseases. In some embodiments, the compositions can be used to increase the hemocrit, assist in mobilizing and recovering stem cells or progenitor cells, stimulate the production of blood cells, assist in vaccine production, assist in gene therapy, or increase apoptosis in tumors, or otherwise stimulate the immune system to effectuate tumor destruction.

[0029] The therapeutic and prophylactic effects of IP-10 mimetics can include, but are not limited to, one or more of the following: (a) an increase or decrease in the number of cells present at a specified location; (b) an increase or decrease in the ability of cells to migrate; (c) an increase or decrease in the response of cells to a stimulus; (d) an increase or decrease in the proliferation, growth, and/or differentiation of cells; (e) an inhibition or acceleration of apoptosis; (f) an ameliorization of one or more symptoms of disease; (g) an enhancement or inhibition of a cell function; and (h) an activation or inhibition of enzyme activity in cells. An increase in the number of cells is “cell expansion,” and the IP-10 mimetics can cause this increase to occur in vivo or ex vivo. Accordingly, the IP-10 mimetics can be used to create mammal cells for diagnostic, prophylactic, therapeutic applications as well as commercial applications that include, but are not limited to, medicinal research and development of products such as, for example, vaccines.

[0030] Generally speaking, a function or activity of a chemokine receptor can be increased or decreased by contacting the receptor with an IP-10 mimetic to increase or decrease the probability of forming a complex between the receptor and a natural binding partner. The term “natural binding partner” includes, but is not limited to, G proteins, polypeptides, lipids, small molecules, or nucleic acids that bind to chemokine receptors in cells or in the extracellular environment. The term natural binding partner also includes substrates that can be acted upon by a chemokine receptor. The terms “modulate,” “modulating,” and the like, can be used in some embodiments to refer to altering the function or activity of a chemokine receptor by contacting it with a chemokine or chemokine analog and thus increasing or decreasing the probability that a complex forms between the receptor and a natural binding partner. The term “complex” refers to an assembly of at least two molecules bound to one another. The concentration of the IP-10 analog can be adjusted to control the degree of the effect.

[0031] The term “natural binding partner” refers to G proteins, polypeptides, lipids, small molecules, or nucleic acids that bind to IP-10 chemokine receptors in cells or in the extracellular environment. The term natural binding partner includes a substrate to be acted upon by the IP-10 chemokine receptor. A change in the interaction between an IP-10 chemokine receptor and a natural binding partner can manifest itself as an increased or decreased probability that the interaction forms, or an increased or decreased concentration of IP-10 chemokine receptor/natural binding partner complex. This can result in a decreased or increased activity of the IP-10 chemokine receptor.

[0032] In some embodiments, the terms “contact,” “contacting,” and the like, can refer to binding an IP-10 analog to a cell, and this can occur in vivo or in vitro, for example. In these embodiments, for example, an IP-10 analog can be contacted with a receptor by adding together a solution or a composition comprising the IP-10 chemokine or IP-10 analog with a liquid medium bath containing a polypeptide or a cell comprising an IP-10 chemokine receptor. The solution comprising the IP-10 chemokine or IP-10 analog may also comprise another component, such as dimethyl sulfoxide (DMSO), which facilitates the uptake of the IP-10 chemokine or IP-10 analog into the cells of the methods. The solution comprising the IP-10 chemokine or IP-10 analog may be added to the medium bathing the cells by utilizing a delivery apparatus, such as a pipette-based device or syringe-based device.

[0033] In some embodiments, an IP-10 mimetic can increase the probability of forming a complex between a chemokine receptor and a natural binding partner. In some embodiments, an IP-10 mimetic can decrease the probability of forming a complex between a chemokine receptor and a natural binding partner. In some embodiments, the concentration of an IP-10 mimetic can control the probability that a complex between a chemokine receptor and a natural binding partner will form. The term “complex” refers to a binding between at least two molecules.

[0034] In some embodiments, the IP-10 analogs can affect the formation of signal transduction complexes. A signal transduction complex often contains at least two protein molecules bound to one another. For instance, a protein tyrosine receptor protein kinase, GRB2, Sos (son of sevenless protein), Raf, and Ras assemble to form a signal transduction complex in response to a mitogenic ligand. In some embodiments, for example, a G protein can be bound to an IP-10 chemokine receptor, and the IP-10 analog can affect the formation of the complex.

[0035] The IP-10 mimetics of the present invention can be administered to treat, prevent, or ameliorate the symptoms of neurological disorders. Due to a traditional view that cells cannot be replaced, current treatments have focused on preventing cell death, but evidence has shown that some cells have the ability to regenerate. Recent research in the use of human stem cells and progenitor cells has catapulted cell replacement therapy to the position of a real alternative to current treatments such as, for example, treatments for neurodegenerative and other diseases. The term “stem cell” can refer to a cell that can be self-renewing over a prolonged time period and can generate multiple phenotypes in response to an exogenous signal. The term “progenitor cell” can refer to a cell that is more restricted in its differentiation capability and undergoes only limited self-renewal. For example, an eosinophil progenitor must become an eosinophil—it can't become a neutrophil, although both are granulocytes.

[0036] Due to the belief that brain and spinal cord cells cannot be replaced, treatments of neurological disorders have, as described above, focused on preventing neuronal death. Evidence has proven that some cells of the central nervous system such as, for example, neuronal stem cells, can regenerate. The term “neuronal stem cell” can refer to a cell that can self-renew, give rise to other cells through asymmetric cell division/differentiation, generate neural tissue, or are derived from the nervous system. Neuronal stem cells exist in a post-implantation developing mammalian nervous system as fetal stem cells and in the adult nervous system as adult stem cells. Neurones and neuronal progenitors can also be derived from the more primitive embryonic stem cell of the inner cell mass (ICM) of the pre- or peri-implantation embryo. For example, progenitor cells are found in an adult mammalian spinal cord and can be manipulated to mature into all of the major cell types that are found in the brain and spinal cord such as, for example, neurons and glial cells. These progenitor cells can be manipulated within the brain and spinal cord, for example, by administering growth factors.

[0037] The term “embryonic stem cell” refers to a primitive form of cell that can be isolated from an embryo days after conception, is unformed and unprogrammed, and has an innate ability to develop into any other type of cell in the body such as, for example, new brain cells, insulin-producing pancreas cells, heart muscle, and other tissues that could take the place of damaged or diseased cells. Accordingly, the implanting of embryonic stem cells can create not only neurons but also cells, tissues and organs of all other systems. When implanted into degenerating areas of the brain, for example, these cells have the capacity to acquire relevant cellular phenotype of the degenerated region and take on functions of cells that were lost through disease.

[0038] Examples of neurological disorders include, but are not limited to, Parkinson's disease, Alzheimer's disease, multiple sclerosis, and any other conditions associated with neuronal stem cells. Parkinson's disease, for example, can be treated with limited success in some cases by drugs including, but not limited to, L-beta-3,4-dihydroxyphenylalanine hydrochloride (L-Dopa). Alzheimer's disease, for example, is irreversible despite treatments with drugs including, but not limited to, ARICEPT®. Such treatments have had limited success in ameliorating symptoms and slowing progression of the disease, but most patients with Alzheimer's disease require some sort of palliative care. Multiple sclerosis, for example, is sometimes responsive to the anti-inflammatory drugs including, but not limited to, interferon-β, but patients with multiple sclerosis remain incurable over the long term. As a result, subjects with multiple sclerosis develop permanent motor, sensory and cognitive deficits. In general, the treatment and reversal of neurodegenerative diseases of the brain and spinal cord remains a formidable challenge.

[0039] In some embodiments, a treatment of a neurological disorder can include administration of a composition comprising an IP-10 mimetic. In some embodiments, a treatment of a neurological disorder can include administering a composition comprising an IP-10 mimetic before, during or after administering one more other treatments or agents. In one example, an IP-10 mimetic can be administered as an agonist to mobilize stem cells in the treatment of a disease. In these embodiments, the IP-10 mimetic can contain the N-terminal portion of the IP-10 and the C-terminal portion of the IP-10 connected by a linker.

[0040] The IP-10 mimetics of the present invention can be administered to treat, prevent, or ameliorate the symptoms of autoimmune disorders. Autoimmune disorders can be organ-specific or systemic and are provoked by different pathogenic mechanisms. Examples of organ-specific autoimmune disorders include, but are not limited to, diabetes, hyperthyroidism, autoimmune adrenal insufficiency, pure red cell anemia, multiple sclerosis, and rheumatic carditis. Examples of systemic autoimmune diseases include systemic lupus erythematosus, rheumatoid arthritis, chronic inflammation, Sjogren's syndrome polymyositis, dermatomyositis and scleroderma. In some embodiments, a treatment of an autoimmune disorder can include administering a composition comprising an IP-10 mimetic. In some embodiments, a treatment of an autoimmune disorder can include administering a composition comprising an IP-10 mimetic before, during or after administering one or more other agents that are diagnostic, therapeutic, or a combination thereof.

[0041] The IP-10 mimetics of the present invention can be administered to treat, prevent, or ameliorate the symptoms of inflammatory disorders. Inflammatory disorders are manifested by an inflammatory response, which is initiated by injury that can be a result of trauma, ischemia or the introduction of foreign particles; and infection, which can be bacterial or viral. Inflammation includes a complex series of events including chemical mediators such as cytokines and prostaglandins; and inflammatory cells such as, for example, leukocytes.

[0042] The inflammatory response is a delicate interplay between the humoral and cellular immune elements that enables elimination of harmful agents and initiation of tissue repair. Unfortunately, the inflammatory response can be a disorder in its own right by causing considerable, and potentially more, damage to tissue than the disorder that initiated the inflammatory response. Examples of inflammatory disorders include, but are not limited to, acute and chronic inflammatory diseases such as, for example, arthritis, atheromas, colitis, chronic inflammatory bowel disease, chronic inflammatory pelvic disease, asthma, psoriasis, and rhinitis. Current treatments for inflammatory disorders include the use of non-steroidal anti-inflammatory drugs, which can cause, inter alia, gastrointestinal side effects; corticosteroids, which can cause, inter alia, an increased risk of infection; and immunosuppressive agents, which can leave a subject defenseless to infections.

[0043] In some embodiments, a treatment of an inflammatory disorder can include administering a composition comprising an IP-10 mimetic. In some embodiments, a treatment of an inflammatory disorder can include administering a composition comprising an IP-10 mimetic, either an agonist or antagonist, before, during or after administering one or more other agents. In some embodiments, the IP-10 mimetic can contain the N-terminal portion of the IP-10 and the C-terminal portion of the IP-10 connected by a linker.

[0044] The IP-10 mimetics of the present invention can be administered to transplant recipients. Transplant rejections occur in recipients receiving tissue from donors that differ genetically, and such rejections are mediated by T-cell dependent mechanisms. Immunosuppressive agents such as calcineurin phosphatase inhibitors and glucocorticosteroids are administered to transplant recipients to prevent allograft rejection. Immunosuppressive agents have a short lasting effect, so transplant recipients normally require life-long treatment with such agents. Life-long treatment with immunosuppressive agents creates serious adverse effects in a recipient such as, for example, the development of infections and tumors.

[0045] In some embodiments, the IP-10 analogs can be used in the treatment of graft rejection. The IP-10 mimetics of the present invention can be administered to transplant recipients to modulate cellular response and achieve effects that are diagnostic, therapeutic, prophylactic, ameliorative or a combination thereof In some embodiments, a treatment of a transplant rejection can include administering a composition comprising an IP-10 mimetic for stem cell mobilization for transplantations. In some embodiments, a treatment of a transplant rejection can include administering a composition comprising an IP-10 mimetic before, during or after administering one or more other agents. In these embodiments, the IP-10 mimetic can contain the N-terminal portion of the IP-10 and the C-terminal portion of the IP-10 connected by a linker.

[0046] The IP-10 mimetics of the present invention can be administered to treat, prevent, or ameliorate the symptoms of cardiovascular disease. Cardiovascular disease is a broad, all-encompassing term that refers to a collection of diseases and conditions and is any disorder of the heart and blood vessels. Examples of cardiovascular disorders and treatments include, but are not limited to, any disease involving heart or vascular tissue such as, for example, atherosclerosis, and ischemic heart or vascular tissue requiring reconstruction and/or management. Traditional therapies used to treat cardiovascular disease have used either angioplasty procedures to compress blockages in arteries or coronary artery bypass grafts to provide an alternate path for blood flow around clogged vascular passageways. A latest generation of treatments includes “therapeutic angiogenesis,” which is an inducement of angiogenesis to produce new blood vessels that supplement or replace a diseased vascular passageway.

[0047] In some embodiments, the IP-10 analogs can be used to treat or manage a wide variety of vascular conditions that include, for example, atherosclerosis, restenosis, vascular disorders associated with autoimmune diseases such as systemic lupus erythematosis, and ischemia-reperfusion. In some embodiments, the IP-10 analogs can be useful in either the promotion or inhibition of angiogenesis.

[0048] In some embodiments, a treatment of a cardiovascular disorder can include administering a composition comprising an IP-10 mimetic to modulate angiogenesis and assist in the reconstruction of heart or vascular tissue, which can include the proliferation and/or mobilization of endothelial cells such as, for example, vascular endothelial cells. In some embodiments, a treatment of a cardiovascular disorder can include administering compositions comprising an IP-10 mimetic before, during or after administering one more other agents. In these embodiments, the IP-10 mimetic can contain the N-terminal portion of the IP-10 and the C-terminal portion of the IP-10 connected by a linker.

[0049] The IP-10 mimetics can be used to treat conditions associated with cancer. The term “cancer” can refer to all types of cancer or neoplasm or malignant tumors found in mammals, especially humans, and include, but are not limited to, sarcomas, leukemias, carcinomas and melanoma. The methods of the present invention include treatments that slow the growth of tumors, prevent tumor growth, induce partial regression of tumors, and induce complete regression of tumors, to the point of complete disappearance. The methods also include preventing the outgrowth of metastases derived from solid tumors.

[0050] The term “leukemia,” for example, refers broadly to progressive, malignant diseases of the blood-forming organs and is generally characterized by a distorted proliferation and development of leukocytes and their precursors in the blood and bone marrow. The major types of leukemias include acute myeloid leukemia, acute lymphoid leukemia, chronic myeloid leukemia, and chronic lymphoid leukemia. Acute leukemias are those that, if left untreated, can cause fatal complications in a very short period of time. Chronic leukemias, on the other hand, may not cause any problems at all for years. Hairy cell leukemia, a disease due to overproduction of mature lymphoid cells, affects blood, bone marrow, lymph glands, spleen and liver and is more commonly seen after age of 50.

[0051] The term “sarcoma” generally refers to a tumor which is made up of a substance like the embryonic connective tissue and is generally composed of closely packed cells embedded in a fibrillar or homogeneous substance. The term “melanoma” is taken to mean a tumor arising from the melanocytic system of the skin and other organs. The term “carcinoma” refers to a malignant new growth made up of epithelial cells tending to infiltrate the surrounding tissues and give rise to metastases.

[0052] The IP-10 analogs can be used to treat or manage a wide variety of cancers that include, but are not limited to, any of a variety of malignancies and their potential metastases, particularly solid and liquid human malignancies; and, relapses of the same. In some embodiments, the cell proliferation disorders include, but are not limited to, lung large cell carcinoma, colon adenocarcinoma, skin cancer (basal cell carcinoma and malignant melanoma), renal adenocarcinoma, promyelocytic leukemia, T cell lymphoma, cutaneous T cell lymphoma, breast adenocarcinoma, steroid sensitive tumors, hairy cell leukemia, Kaposi's Sarcoma, chronic myelogenous leukemia, multiple myeloma, superficial bladder cancer, ovarian cancer, and glioma.

[0053] In some embodiments, the cell proliferation disorders include cells derived from reproductive tissue (such as Sertoli cells, germ cells, developing or more mature spermatogonia, spermatids or spermatocytes and nurse cells, germ cells and other cells of the ovary), the lymphoid or immune systems (such as Hodgkin's disease and non-Hodgkin's lymphomas), the hematopoietic system, and epithelium (such as skin, including malignant melanoma, and gastrointestinal tract), solid organs, the nervous system, e.g. glioma (see Y. X. Zhou et al., 2002), and musculo-skeletal tissue.

[0054] In some embodiments, the cell proliferation disorders include solid tumor types, including, but not limited to, brain, including medulloblastoma, head and neck, breast, colon, small cell lung, large cell lung, thyroid, testicle, bladder, prostate, liver, kidney, pancreatic, esophogeal, stomach, ovarian, pr cervical tumors. Treatment of breast, colon, lung, and prostate tumors is particularly contemplated.

[0055] The IP-10 mimetics can be used to prevent, treat, or ameliorate the symptoms of, a variety of haematological disorders. Examples of hematological disorders include, but are not limited to, bone marrow depression, aplastic anemia, agranulocytosis, leukopenia, pancytopenia, thrombocytopenia, macrocytic or megaloblastic anemia. In some embodiments, a treatment of a hematological disorder can include managing white blood cells, platelets, red blood cells, stem cells and various progenitor subsets by administering a composition comprising an IP-10 mimetic. In some embodiments, an IP-10 mimetic can be administered as an agonist to mobilize stem cells in the treatment of a disease. In one example, an IP-10 can be administered to increase the proliferation of blood cells and/or mobilize the blood cells into the bloodstream. In some embodiments, a treatment of a hematological disorder can include administering a composition comprising an IP-10 mimetic before, during or after administration of one or more other treatments or agents. In these embodiments, the IP-10 mimetic can contain the N-terminal portion of the IP-10 and the C-terminal portion of the IP-10 connected by a linker.

[0056] The IP-10 analogs can be used to treat or manage a wide variety of conditions associated with cancers that include, but are not limited to, a diverse group of hematopoietic stem cell disorders known as myelodysplastic syndrome (MDS). Such disorders are characterized by a cellular marrow with an impaired morphology and maturation (dysmyelopoiesis), peripheral blood cytopenias, and a variable risk of progression to acute leukemia that results from an ineffective blood cell production. See The Merck Manual 953, (17^{th} ed. 1999).

[0057] Disorders associated with cancers can result from an initial hematopoietic stem cell injury that can be from a variety of causes including, but not limited to, cytotoxic chemotherapy, radiation therapy, virus, chemical exposure and genetic predisposition. A clonal mutation predominates over bone marrow and suppresses healthy stem cells. In the early stages of MDS, for example, a main cause of cytopenia is an increase in programmed cell death, or apoptosis. As the disease progresses and converts into leukemia, gene mutation rarely occurs and a proliferation of leukemic cells overwhelms the healthy marrow. The course of the disease can vary, and some cases can behave as an indolent disease, whereas others can behave aggressively with a short clinical progression into an acute form of leukemia. Subjects that survive a malignancy treatment with chemotherapy drugs such as, for example, alkylating agents, with or without radiotherapy, can have a high incidence of developing MDS or secondary acute leukemia. Examples of treatments for MDS include, but are not limited to, bone marrow transplantation, transfusions, and administration of hematopoietic growth factors and cytokines. Since the IP-10 mimetics are chemokines, they are a subspecies of cytokines.

[0058] In some embodiments, a treatment of a condition associated with cancer can include the administrating a composition comprising an IP-10 mimetic before, during or after chemotherapy or radiotherapy. In some embodiments, a treatment of a condition associated with cancer can include administering a composition comprising an IP-10 mimetic before, during or after administering one more other treatments or agents. In one example, an IP-10 mimetic can be administered as an antagonist to inhibit or prevent the proliferation of cancer cells. In another example, an IP-10 mimetic can be administered during recovery from chemotherapy and/or radiotherapy to expedite recovery of the blood count. In these embodiments, the IP-10 mimetic can contain the N-terminal portion of the IP-10 and the C-terminal portion of the IP-10 connected by a linker.

[0059] In some embodiments, the IP-10 analogs can be administered to prevent, treat, or ameliorate the symptoms of a bacterial infection, viral infection, and sepsis. The IP-10 analogs can also be instrumental in controlling tumirogenesis. Moreover, IP-10 chemokines have also been identified as playing a role in osteoporosis and, as such, the IP-10 analogs can be instrumental in the treatment of osteoporosis.

[0060] In some embodiments, the IP-10 analogs can be used in gene therapy to treat genetic disease. For example, the IP-10 analogs may prove useful in arresting the cell cycle for conducting gene therapy.

[0061] In some embodiments, the IP-10 analogs can be used to prepare vaccines, to enhance humoral antibody production, to increase antigen-presenting T-cells, to increase dendritic cells and immunological features known as vaccine induction, and combinations thereof The term “antibody” can refer to any antibody-like molecule that has an antigen binding region, and includes antibody fragments such as Fab′, Fab, F(ab′)₂, single domain antibodies (DABs), Fv, scFv (single chain Fv), and the like. Techniques for preparing and using various antibody-based constructs and fragments are well known in the art as are techniques for preparing and characterizing antibodies. In some embodiments, the IP-10 analogs taught herein can be used as antigens to produce antibodies using methods well-known to those skilled in the art. In these embodiments, the antibody can be polyclonal or monoclonal. In some embodiments, the antibody is humanized.

Synthesis and Design of the IP-10 Analogs

[0062] The amino acids used in the present invention may comprise an amino group and a carboxyl group, and the amino group may be primary or secondary. Examples of amino acids include, but are not limited to, glycine, alanine, valine, leucine, isoleucine, methionine, phenylalanine, tyrosine, aspartic acid, glutamic acid, lysine, arginine, serine, threonine, cysteine, asparagine, proline, tryptophan, histidine and combinations thereof.

[0063] In some embodiments, the amino acids may be limited to bifunctional amino acids, trifunctional amino acids, diamines, triamines, monocarboxylics, or dicarboxylics. In some embodiments, an amino acids may be limited to containing aliphatics or aromatics. In some embodiments, the amino acids may not include lysine. It is to be appreciated that one skilled in the art will recognize that some of the groups, subgroups, and individual amino acids may not be used in some embodiments of the present invention.

[0064] The natural amino acids are identified in the present application by the conventional one-letter and three-letter abbreviations as indicated below, and are preceded by “L-” to indicate their L-form and by “D-” to refer to their D form. These abbreviations are generally accepted in the peptide art as recommended by the IUPAC-IUB commission in biochemical nomenclature:

| | | | | | |
|---|---|---|---|---|---|
| Alanine | A | Ala | Leucine | L | Leu |
| Arginine | R | Arg | Lysine | K | Lys |
| Asparagine | N | Asn | Methionine | M | Met |
| Aspartic acid | D | Asp | Phenylalanine | F | Phe |
| Cysteine | C | Cys | Proline | P | Pro |
| Glutamic acid | E | Glu | Serine | S | Ser |
| Glutamine | Q | Gln | Threonine | T | Thr |
| Glycine | G | Gly | Tryptophan | W | Trp |
| Histidine | H | His | Tyrosine | Y | Tyr |
| Isoleucine | I | Ile | Valine | V | Val |
| Ornithine | O | Orn | | | |

[0065] All of the peptide sequences set out herein are written according to the generally accepted convention, whereby the N-terminal amino acid is on the left of a described sequence and the C-terminal amino acid is on the right of the described sequence.

Synthesis of the IP-10 Analogs

[0066] The IP-10 analog compounds may be prepared by standard techniques known in the art. A peptide or polypeptide component of an IP-10 analog may comprise, at least in part, a peptide synthesized using standard techniques (such as those described by Clark-Lewis, I., Dewald, B., Loetscher, M., Moser, B., and Baggiolini, M., (1994) J. Biol. Chem., 269, 16075-16081, Merrifield R. B. (1963) J Am Chem Soc., 85, 2149-2154). Automated peptide synthesizers are commercially available (e.g., Advanced ChemTech Model 396; Milligen/Biosearch 9600, Appliedbiosystems/Pioneer). The peptides and polypeptides may be assayed for IP-10 chemokine receptor agonist or antagonist activity in accordance with standard methods.

[0067] Peptides and polypeptides may be purified by HPLC and analyzed by mass spectrometry. Peptides and polypeptides may be dimerized. In one embodiment, peptides and polypeptides are dimerized via a disulfide bridge formed by gentle oxidation of the cysteines using 10% DMSO in water. Following HPLC purification, dimer formation may be verified, by mass spectrometry. One or more modifying groups may be attached to an IP-10 derived peptidic component by standard methods, for example, using methods for reaction through an amino group (e.g., the alpha-amino group at the amino-terminus of a peptide), a carboxyl group (e.g., at the carboxy terminus of a peptide), a hydroxyl group (e.g., on a tyrosine, serine or threonine residue) or other suitable reactive group on an amino acid side chain.

[0068] In some embodiments, the IP-10 analogs comprising the C-terminal and N-terminal regions joined by a linker could be cyclized. In these embodiments, the cyclization can occur in the C-terminal region using side-chain to side-chain; side-chain to scaffold or, scaffold to scaffold cyclization. In some embodiments, lactamization, etherification, or RCM (Ring Closing Methatesis) can be used to carry out this reaction.

[0069] For instance, IP-10 analogs may be cyclized using a lactam formation procedure by joining the γ-carboxy side chain or the α-carboxy moiety of glutamate (Glu) residue to the ε-amino side chain of lysine (Lys) residue, as indicated in the following sequences by underlining of linked residues. Lactams may for example be formed between glutamic acid and lysine (Lys) in the C-terminal portion of the polypeptide.

[0070] As described above, the IP-10 analogs can include conservative amino acid substitutions. In some embodiments, a conservatively modified sequence has one or more of the amino acid residues replaced by an amino acid residue having a side chain with similar properties. Families of amino acid residues having side chains with similar properties are well known in the art and there are a few different conventions for comparing amino acids. Generally speaking, these conventions typically include a characterization of the amino acids using some form of grouping by chemical structure. (Note that the numbering schemes used for the amino acids can also vary and do not always correspond to the native sequence; most often the numbering corresponds to the native sequence or to that of the analog).

[0071] In some embodiments, the amino acids can be grouped as follows: amino acids with acidic side chains (e.g., aspartic acid, glutamic acid), basic side chains (e.g., lysine, arginine, histidine), uncharged polar side chains (e.g., glycine, asparagine, glutamine, serine, threonine, tyrosine, cysteine), nonpolar side chains (e.g., alanine, valine, leucine, isoleucine, proline, phenylalanine, methionine, tryptophan), beta-branched side chains (e.g., threonine, valine, isoleucine) and aromatic side chains (e.g., tyrosine, phenylalanine, tryptophan, histidine). Thus, in some embodiments, an amino acid residue in a chemokine can be replaced with another amino acid residue from the same side chain family. In some embodiments, the conservative substitutions include, but are not limited to, substituting a Lys with Orn or any other (L or D) natural or (L or D) non-natural amino acid having an amino group on its side chain, or a Glu with Asp. In some embodiments, the conservative substitutions include, but are not limited to, the following: Gly [symbol] , Val [symbol] Ile [symbol] Leu, Asp [symbol] Glu, Lys [symbol] Arg, Asn [symbol] Gln, and Phe [symbol] Trp [symbol] Tyr.

Recombinant Synthesis

[0072] IP-10 chemokine, IP-10 chemokine fragments, or IP-10 analogs may also be synthesized, in whole or in part, by recombinant methods using expression vectors encoding all or part of a IP-10 chemokine.

[0073] Vectors, or preferably expression vectors, may contain a gene encoding a polypeptide of the invention, a functional derivative thereof, or another useful polypeptide. These vectors may be employed to express the encoded polypeptide in either prokaryotic or eukaryotic cells.

[0074] The term “vector” in this application refers to a DNA molecule into which another DNA of interest can be inserted by incorporation into the DNA of the vector. One skilled in the art is familiar with the term. Examples of classes of vectors can be plasmids, cosmids, viruses, and bacteriophage. Typically, vectors are designed to accept a wide variety of inserted DNA molecules and then used to transfer or transmit the DNA of interest into a host cell (e.g., bacterium, yeast, higher eukaryotic cell). A vector may be chosen based on the size of the DNA molecule to be inserted, as well as based on the intended use. For transcription into RNA or transcription followed by translation to produce an encoded polypeptide, an expression vector would be chosen. For the preservation or identification of a specific DNA sequence (e.g., one DNA sequence in a cDNA library) or for producing a large number of copies of the specific DNA sequence, a cloning vector would be chosen. If the vector is a virus or bacteriophage, the term vector may include the viral/bacteriophage coat.

[0075] Following entry into a cell, all or part of the vector DNA, including the insert DNA, may be incorporated into the host cell chromosome, or the vector may be maintained extrachromosomally. Those vectors that are maintained extrachromosomally are frequently capable of autonomous replication in a host cell into which they are introduced (e.g., many plasmids having a bacterial origin of replication). Other vectors are integrated into the genome of a host cell upon introduction into the host cell, and thereby are replicated along with the host genome.

[0076] The term “expression vector” refers to a DNA construct which allows one to place a gene encoding a gene product of interest, usually a protein, into a specific location in a vector from which the selected gene product can be expressed by the machinery of the host cell, or alternately, by in vitro expression system. This type of vector is frequently a plasmid, but other forms of expression vectors, such as bacteriophage vectors and viral vectors (e.g., adenoviruses, replication defective retroviruses, and adeno-associated viruses), may be employed. The selection of expression vectors, control sequences, transformation methods, and the like, are dependent on the type of host cell used to express the gene.

### Prokaryotic Hosts

[0077] Prokaryotic hosts are, in generally, very efficient and convenient for the production of recombinant polypeptides and are, therefore, one type of preferred expression system. Prokaryotes most frequently are represented by various strains of E. coli, but other microbial strains may be used, including other bacterial strains. Recognized prokaryotic hosts include bacteria such as E. coli, Bacillus, Streptomyces, Pseudomonas, Salmonella, Serratia, and the like. However, under such conditions, recombinantly-produced polypeptides will not be glycosylated.

[0078] In prokaryotic systems, vectors that contain replication sites and control sequences derived from a species compatible with the host may be used. Preferred prokaryotic vectors include plasmids such as those capable of replication in E. coli (such as, for example, pBR322, ColEl, pSC101, pACYC 184, pVX, pUC118, pUC119 and the like). Suitable phage or bacteriophage vectors may include λgt10, λgt11, vectors derived from filamentous bacteriophage such as m13, and the like. Suitable Streptomyces plasmids include p1J101, and streptomyces bacteriophages such as fC31. Bacillus plasmids include pC194, pC221, pT127, and the like. Suitable Pseudomonas plasmids have been reviewed by Izaki (Jpn. J. Bacteriol. 33:729-742, 1978) and John et al. (Rev. Infect. Dis. 8:693-704, 1986).

[0079] To express a protease of the invention (or a functional derivative thereof) in a prokaryotic cell, it is necessary to operably link the sequence encoding the protease of the invention to a functional prokaryotic promoter. Such promoters are either constitutive or inducible promoters, but commonly inducible promoters are used. Examples of constitutive promoters include the int promoter of bacteriophage λ, the bla promoter of the β-lactamase gene sequence of pBR322, and the cat promoter of the chloramphenicol acetyl transferase gene sequence of pPR325, and the like. Examples of inducible prokaryotic promoters include the major right and left promoters of bacteriophage λ (PL and PR), the trp, recA, lacZ, lacI, and gal promoters of E. coli, the α-amylase and the V-28-specific promoters of B. subtilis, the promoters of the bacteriophages of Bacillus, and Streptomyces promoters. Prokaryotic promoters are reviewed by Glick (Ind. Microbiot. 1:277-282, 1987), Cenatiempo (Biochimie 68:505-516, 1986), and Gottesman (Ann. Rev. Genet. 18:415-442, 1984). Additionally, proper expression in a prokaryotic cell also requires the presence of a ribosome-binding site upstream of the encoding sequence. Such ribosome-binding sites are disclosed, for example, by Gold et al. (Ann. Rev. Microbiol. 35:365-404, 1981).

### Fusion Protein

[0080] Proteins may be expressed as fusion proteins. Genes for proteins expressed as fusion proteins ligated into expression vectors that add a number of amino acids to a protein encoded and expressed, usually to the amino terminus of the recombinant protein. Such a strategy of producing fusion proteins is usually adopted for three purposes: (1) to assist in the purification by acting as a ligand in affinity purification, (2) to increase the solubility of the product, and (3) to increase the expression of the product. Often, expression vectors for use in fusion protein production, a proteolytic cleavage site is included at the junction of the fusion region and the protein of interest to enable purification of the recombinant protein away from the fusion region following affinity purification of the fusion protein. Such enzymes, and their cognate recognition sequences, include Factor Xa, thrombin and enterokinase, and may also include trypsin or chymotrypsin. Typical fusion expression vectors include pGEX (Pharmacia Biotech Inc; Smith, D. B. and Johnson, K. S. (1988) Gene 67:31-40), pMAL (New England Biolabs, Beverly, Mass.) and pRIT5 (Pharmacia, Piscataway, N.J.) which fuse glutathione S-transferase (GST), maltose E binding protein, or protein A, respectively, to the target recombinant protein.

### Improving Yield

[0081] Maximizing recombinant protein expression in E. coli can be assisted by expressing the protein or fusion protein in host bacteria with an impaired proteolytic system so as to reduce the post-synthesis degradation of the recombinant protein (Gottesman, S., Gene Expression Technology: Methods in Enzymology 185, Academic Press, San Diego, Calif. (1990) 119-128). Another strategy is to alter the mix of codons used in the coding sequence to reflect the usage of the individual codons for each amino acid in the host (e.g., E. coli (Wada et al., (1992) Nucleic Acids Res. 20:2111-2118)). Such alteration of nucleic acid sequences of the invention can be carried out by standard DNA synthesis techniques and may prove useful for a variety of prokaryotic and eukaryotic expression systems.

### Eukaryotic Hosts

[0082] Suitable hosts may include eukaryotic cells. Preferred eukaryotic hosts include, for example, yeast, fungi, insect cells, and mammalian cells both in vivo and in tissue culture. Useful mammalian cell hosts include HeLa cells, cells of fibroblast origin such as VERO or CHO-K1, and cells of lymphoid origin and their derivatives. Preferred mammalian host cells include SP2/0 and J558L, as well as neuroblastoma cell lines such as IMR 332, which may provide better capacities for correct post-translational processing. In general, eukaryotic organisms such as yeast provide substantial advantages in that they can also carry out post-translational modifications.

[0083] A large number of yeast expression systems may be potentially utilized which incorporate promoter and termination elements from the actively expressed sequences coding for glycolytic enzymes. These expression systems produce in large quantities of proteins when yeast are grown in mediums rich in glucose. Known glycolytic gene sequences can also provide very efficient transcriptional control signals. A number of recombinant DNA strategies exist utilizing strong promoter sequences and high copy number plasmids which can be utilized for production of the desired proteins in yeast. Examples of vectors suitable for expression in S. cerivisae include pYepSec1 (Baldari, et al., (1987) Embo J. 6:229-234), pMFa (Kurjan and Herskowitz, (1982) Cell 30:933-943), pJRY88 (Schultz et al., (1987) Gene 54:113-123), pYES2 (InVitrogen Corporation, San Diego, Calif.), and picZ (InVitrogen Corp, San Diego, Calif.).

[0084] In another embodiment, the protein of interest may be expressed in insect cells for example the Drosophila larvae. Using insect cells as hosts, the Drosophila alcohol dehydrogenase promoter may be used (Rubin, Science 240: 1453-1459, 1988). Additionally, baculovirus vectors can be engineered to express large amounts of the protein of interest in cultured insect cells (e.g., Sf 9 cells)(Jasny, Science 238:1653, 1987; Miller et al., in: Genetic Engineering, Vol. 8, Plenum, Setlow et al., eds., pp. 277-297, 1986). Vectors which may be used include the pAc series (Smith et al. (1983) Mol. Cell Biol. 3:2156-2165) and the pVL series (Lucklow and Summers (1989) Virology 170:31-39).

[0085] Plant cells may also be utilized as hosts, and control sequences compatible with plant cells are available, such as the cauliflower mosaic virus 35S and 19S promoters, and nopaline synthase promoter and polyadenylation signal sequences. Furthermore, the protein of interest may be expressed in plants which have incorporated the expression vector into their germ line.

[0086] In yet another embodiment, a nucleic acid of the invention may be expressed in mammalian cells using a mammalian expression vector. Possibilities and techniques for expression in mammalian cells has recently been summarized (Colosimo, et al., “Transfer and expression of foreign genes in mammalian cells,” Biotechniques 29(2):314-8, 320-2, 324 passim, 2000; which is hereby incorporated by reference in its entirety including any drawings, tables, and figures.). Examples of mammalian expression vectors include pCDM8 (Seed, B. (1987) Nature 329:840) and pMT2PC (Kaufinan et al. (1987) EMBO J. 6:187-195). For use in mammalian cells, the regulatory sequences of the expression vector are often derived from viral regulatory elements. For example, commonly used promoters are derived from Simian Virus 40 (SV40), polyoma, Adenovirus 2, and cytomegalovirus (CMV) viruses. Preferred eukaryotic promoters include, for example, the promoter of the mouse metallothionein I gene sequence (Hamer et al., J. Mol. Appl. Gen. 1:273-288, 1982); the TK promoter of Herpes virus (McKnight, Cell 31:355-365, 1982); the SV40 early promoter (Benoist et al., Nature (London) 290:304-31, 1981); and the yeast gal4 gene sequence promoter (Johnston et al., Proc. Natl. Acad. Sci. (USA) 79:6971-6975, 1982; Silver et al., Proc. Natl. Acad. Sci. (USA) 81:5951-5955, 1984). Alternatively, promoters from mammalian expression products, such as actin, collagen, myosin, and the like, may be employed. Regulatory elements may also be derived from adenovirus, bovine papilloma virus, cytomegalovirus, simian virus, or the like.

[0087] Transcriptional initiation regulatory signals may be selected which allow for repression or activation, so that expression of the gene sequences can be modulated. Of interest are regulatory signals which are temperature-sensitive so that by varying the temperature, expression can be repressed or initiated, or are subject to chemical (such as metabolite) regulation. Expression of proteins of interest in eukaryotic hosts requires the use of eukaryotic regulatory regions. Such regions will, in general, include a promoter region sufficient to direct the initiation of RNA synthesis.

[0088] The recombinant mammalian expression vector may also be designed to be capable of directing expression of the nucleic acid preferentially in a particular cell type (i.e., tissue-specific regulatory elements are used to control the expression). Such tissue-specific promoters include the liver-specific albumin promoter (Pinkert et al. (1987) Genes Dev. 1:268-277); lymphoid-specific promoters (e.g., Calame and Eaton (1988) Adv. Immunol. 43:235-275), and in particular promoters of immunoglobulins and T cell receptors (Winoto and Baltimore (1989) EMBO J. 8:729-733, Banerji et al. (1983) Cell 33:729-740; Queen and Baltimore (1983) Cell 33:741-748); mammary gland-specific promoters (e.g., milk whey promoter; U.S. Pat. No. 4,873,316 and European Application Publication No. 264,166); and pancreas-specific promoters (Edlund et al. (1985) Science 230:912-916). Developmentally-regulated promoters may also be utilized, for example, the α-fetoprotein promoter (Campes and Tilghman (1989) Genes Dev. 3:537-546), and the murine hox promoters (Kessel and Gruss (1990) Science 249:374-379).

[0089] Preferred eukaryotic plasmids include, for example, SV40, BPV, pMAM-neo, pKRC, vaccinia, 2-micron circle, and the like, or their derivatives. Such plasmids are well known in the art (Botstein et al., Miami Wntr. Symp. 19:265-274, 1982; Broach, In: “The Molecular Biology of the Yeast Saccharomyces: Life Cycle and Inheritance,” Cold Spring Harbor Laboratory, Cold Spring Harbor, N.Y., p. 445-470, 1981; Broach, Cell 28:203-204, 1982; Bollon et al., J. Clin. Hematol. Oncol. 10:39-48, 1980; Maniatis, In: Cell Biology: A Comprehensive Treatise, Vol. 3, Gene Sequence Expression, Academic Press, N.Y., pp. 563-608, 1980).

[0090] Once the vector or nucleic acid molecule containing the construct(s) has been prepared for expression, the DNA construct(s) may be introduced into an appropriate host cell by any of a variety of suitable means, i.e., transformation, transfection, conjugation, protoplast fusion, electroporation, particle gun technology, DEAE-dextran-mediated transfection, lipofection, calcium phosphate-precipitation, direct microinjection, and the like. Suitable methods for transforming or transfecting host cells can be found in Sambrook, et al. (2001). After the introduction of the vector, recipient cells are grown in a selective medium, which selects for the growth of vector-containing cells. Expression of the cloned gene(s) results in the production of a protein of interest, or fragments thereof.

[0091] For other suitable expression systems for both prokaryotic and eukaryotic cells see Sambrook, et al., “Molecular Cloning: A Laboratory Manual,” 3rd ed., Cold Spring Harbor Laboratory, Cold Spring Harbor Laboratory Press, Cold Spring Harbor, N.Y., 2001, which is hereby incorporated by reference in its entirety, including any drawings, figures, and tables.

[0092] For transformation of eukaryotic cells, it is known that, depending upon the expression vector and transfection technique used, only a small fraction of cells may integrate the foreign DNA into their genome. In order to identify and select these integrants, a gene that encodes a selectable marker (e.g., resistance to antibiotics) is generally introduced into the host cells along with the gene of interest. Preferred selectable markers include those which confer resistance to drugs, such as G418, hygromycin, neomycin, methotrexate, glyphosate, and bialophos. Nucleic acid encoding a selectable marker can be introduced into a host cell on the same vector as that encoding the protein of interest or can be introduced on a separate vector. Cells stably transformed with the introduced nucleic acid can be identified by drug selection (e.g., cells that have incorporated the selectable marker gene will survive, while the other cells die).

[0093] A host cell of the invention, such as a prokaryotic or eukaryotic host cell in culture, can be used to produce (i.e., express) the protein of interest. Accordingly, the invention further provides methods for producing the protein of interest using the host cells of the invention. In one embodiment, the method comprises culturing the host cell into which a recombinant expression vector encoding the protein of interest has been introduced in a suitable medium such that the protein of interest is produced, and may be purified by one skilled in the art.

[0094] In many embodiments, the IP-10 analogs are designed using one or more of the following: (1) replacing all or part of the beta-sheet domain of an IP-10 chemokine with a linker; (2) connecting all or a portion of the amino-terminal domain and all or a portion of the carboxy-terminal domain of an IP-10 chemokine with a linker; (3) cyclizing residues within an analog; (4) replacing the cysteines of an IP-10 chemokine with other amino acids; and (5) attaching modifying groups to an IP-10 analog such as, for example, to the amino terminus, carboxy terminus, or a combination thereof.

Modifying Groups

[0095] Generally speaking, the IP-10 mimetics may include derivatives of IP-10 chemokines, analogs of IP-10 chemokines, and conservatively modified variants thereof. Examples of such mimetics include C-terminal hydroxymethyl derivatives; O-modified derivatives (e.g., C-terminal hydroxymethyl benzyl ether); N-terminally modified derivatives including substituted amides such as alkylamides and hydrazides and compounds in which a C-terminal phenylalanine residue is replaced with a phenethylamide analogue (e.g., Ser-Ile-phenethylamide as an analog of the tripeptide Ser-Ile-Phe); glycosylated IP-10 chemokine derivatives; polyethylene glycol modified derivatives; biotinylated derivatives; and combinations thereof The IP-10 analogs may also include a pharmaceutically acceptable salt of an IP-10 analog.

[0096] In some embodiments, the IP-10 analogs may be coupled directly or indirectly to at least one modifying group. The term “modifying group” can be used in some embodiments to describe structures that are directly attached to the peptidic structure (e.g., by covalent bonding or covalent coupling), as well as those that are indirectly attached to the peptidic structure (e.g., by a stable non-covalent bond association or by covalent coupling through a linker to additional amino acid residues). The term “modifying group” may also refer to mimetics, analogues or derivatives thereof, which may flank the IP-10 core peptidic structure.

[0097] In some embodiments, the modifying groups can be coupled to the amino-terminus or carboxy-terminus of an IP-10 peptidic structure, or to a peptidic or peptidomimetic region flanking the core structure. Alternatively, the modifying group can be coupled to a side chain of at least one amino acid residue of an IP-10 peptidic structure, or to a peptidic or peptido-mimetic region flanking the core domain (e.g., through the epsilon amino group of a lysyl residue(s); through the carboxyl group of an aspartic acid residue(s) or a glutamic acid residue(s); through a hydroxy group of a tyrosyl residue(s), a serine residue(s) or a threonine residue(s); or any other suitable reactive group on an amino acid side chain). The modifying groups can be covalently coupled to the peptidic structure and can be attached by means and methods well known in the art for linking chemical structures, including, for example, amide, alkylamino, sulfide, carbamate or urea bonds.

[0098] In some embodiments, the modifying group may comprise a cyclic, heterocyclic or polycyclic group. The term “cyclic group,” as used herein, includes cyclic saturated or unsaturated (i.e., aromatic) group having from 3 to 10; from 4 to 8; or 5, 6, or 7 carbon atoms. Exemplary non-aromatic cyclic groups include cyclopropyl, cyclobutyl, cyclopentyl, cyclohexyl, and cyclooctyl groups. The term “heterocyclic group” includes optionally substituted, saturated or unsaturated, three- to eight-membered cyclic structures in which one or more skeletal atoms is oxygen, nitrogen, sulfur, or combinations thereof.

[0099] Cyclic groups may be unsubstituted or substituted at one or more ring positions. A cyclic group may for example be substituted with halogens, alkyls, cycloalkyls, alkenyls, alkynyls, aryls, arylalkyls, heterocycles, hydroxyls, aminos, nitros, thiols amines, imines, amides, phosphonates, phosphines, carbonyls, carboxyls, silyls, ethers, thioethers, sulfonyls, sulfonates, selenoethers, ketones, aldehydes, esters, —CF₃, —CN. The cyclic group may also be linked to a substituent, such as halogens, alkyls, cycloalkyls, alkenyls, alkynyls, aryls, arylalkyls, heterocycles, hydroxyls, aminos, nitros, thiols amines, imines, amides, phosphonates, phosphines, carbonyls, carboxyls, silyls, ethers, thioethers, sulfonyls, sulfonates, selenoethers, ketones, aldehydes, esters, —CF₃, or —CN, by means of a saturated or unsaturated chain of 1, 2, 3, 4, 5, 6, 7, 8, or more carbon atoms; additionally, one or more of the carbon atoms may be replaced with an oxygen, nitrogen, or sulfur atom. One of skill will appreciate that these means of linking are taught for example only, and that other means of linking are available in the art.

[0100] The term “heterocyclic group” includes cyclic saturated, unsaturated and aromatic groups having from 3 to 10; from 4 to 8; or 5, 6, or 7 carbon atoms, wherein the ring structure includes about one or more heteroatoms. Heterocyclic groups include pyrrolidine, oxolane, thiolane, imidazole, oxazole, piperidine, piperazine, morpholine. The heterocyclic ring may be substituted at one or more positions with such substituents as, for example, halogens, alkyls, cycloalkyls, alkenyls, alkynyls, aryls, arylalkyls, other heterocycles, hydroxyl, amino, nitro, thiol, amines, imines, amides, phosphonates, phosphines, carbonyls, carboxyls, silyls, ethers, thioethers, sulfonyls, selenoethers, ketones, aldehydes, esters, —CF₃, —CN. Heterocycles may also be bridged or fused to other cyclic groups as described below. A linker may also link the heterocyclic group to such substituents as, for example, halogens, alkyls, cycloalkyls, alkenyls, alkynyls, aryls, arylalkyls, heterocycles, hydroxyls, aminos, nitros, thiols amines, imines, amides, phosphonates, phosphines, carbonyls, carboxyls, silyls, ethers, thioethers, sulfonyls, sulfonates, selenoethers, ketones, aldehydes, esters, —CF₃, —CN.

[0101] The term “polycyclic group” as used herein is intended to refer to two or more saturated, unsaturated, or aromatic cyclic rings in which two or more carbons are common to two adjoining rings, so that the rings are “fused rings.” Rings that are joined through non-adjacent atoms are termed “bridged” rings. Each of the rings of the polycyclic group may be substituted with such substituents as described above, as for example, halogens, alkyls, cycloalkyls, alkenyls, alkynyls, hydroxyl, amino, nitro, thiol, amines, imines, amides, phosphonates, phosphines, carbonyls, carboxyls, silyls, ethers, thioethers, sulfonyls, selenoethers, ketones, aldehydes, esters, —CF₃, or —CN.

[0102] The term “alkyl” refers to saturated aliphatic groups, including straight chain alkyl groups, branched-chain alkyl groups, cycloalkyl (alicyclic) groups, alkyl substituted cycloalkyl groups, and cycloalkyl substituted alkyl groups. In some embodiments, a straight chain or branched chain alkyl has 20 or fewer carbon atoms in its backbone (C₁-C₂₀ for straight chain, C₃-C₂₀ for branched chain), 15 or few carbon atoms; 12 or fewer carbon atoms; or 10 or fewer carbon atoms. In some embodiments, cycloalkyls may have from 4-10 carbon atoms in their ring structure, such as rings made from 5, 6 or 7 carbon atoms. Unless the number of carbons is otherwise specified, “lower alkyl” as used herein means an alkyl group, as defined above, having from one to ten carbon atoms in its backbone structure. Likewise, “lower alkenyl” and “lower alkynyl” have chain lengths of ten or less carbons.

[0103] The term “alkyl” (or “lower alkyl”) as used throughout the specification and claims is intended to include both “unsubstituted alkyls” and “substituted alkyls,” the latter of which refers to alkyl moieties having substituents replacing a hydrogen on one or more carbons of the hydrocarbon backbone. Such substituents can include, for example, halogen, hydroxyl, carbonyl (such as carboxyl, ketones (including alkylcarbonyl and arylcarbonyl groups)), and esters (including alkyloxycarbonyl and aryloxycarbonyl groups), thiocarbonyl, acyloxy, alkoxyl, phosphoryl, phosphonate, phosphinate, amino, acylamino, amido, amidine, imino, cyano, nitro, azido, sulfhydryl, alkylthio, sulfate, sulfonate, sulfamoyl, sulfonamido, heterocyclyl, aralkyl, or an aromatic or heteroaromatic moiety.

[0104] The moieties substituted on the hydrocarbon chain can themselves be substituted, if appropriate. For instance, the substituents of a substituted alkyl may include substituted and unsubstituted forms of aminos, azidos, iminos, amidos, phosphoryls (including phosphonates and phosphinates), sulfonyls (including sulfates, sulfonamidos, sulfamoyls and sulfonates), or silyl groups, as well as ethers, alkylthios, carbonyls (including ketones, aldehydes, carboxylates, and esters), —CF₃, —CN and the like. Exemplary substituted alkyls are described below. Cycloalkyls can be further substituted with alkyls, alkenyls, alkoxys, alkylthios, aminoalkyls, carbonyl-substituted alkyls, —CF3, —CN, and the like.

[0105] The terms “alkenyl” and “alkynyl” refer to unsaturated aliphatic groups analogous in length and possible substitution to the alkyls described above, but that contain at least one double or triple bond respectively. The term “aralkyl,” as used herein, refers to an alkyl or alkylenyl group substituted with at least one aryl group. Exemplary aralkyls include benzyl (i.e., phenylmethyl), 2-naphthylethyl, 2-(2-pyridyl)propyl, 5-dibenzosuberyl, and the like. The term “alkylcarbonyl,” as used herein, refers to —C(O)-alkyl. Similarly, the term “arylcarbonyl” refers to —C(O)-aryl. The term “alkyloxycarbonyl,” as used herein, refers to the group —C(O)—O-alkyl, and the term “aryloxycarbonyl” refers to —C(O)—O-aryl. The term “acyloxy” refers to —O—C(O)—R₇, in which R₇ is alkyl, alkenyl, alkynyl, aryl, aralkyl or heterocyclyl.

[0106] The term “amino,” as used herein, refers to —N(R_{α})(R_{β}), in which R_{α} and R_{β} are each independently hydrogen, alkyl, alkyenyl, alkynyl, aralkyl, aryl, or in which R_{α} and R_{β} together with the nitrogen atom to which they are attached form a ring having 4-8 atoms. Thus, the term “amino,” as used herein, includes unsubstituted, monosubstituted (e.g., monoalkylamino or monoarylamino), and disubstituted (e.g., dialkylamino or alkylarylamino) amino groups. The term “amido” refers to —C(O)—N(R_{α})(R_{β}), in which R_{α} and R_{β} are as defined above. The term “acylamino” refers to —N(R′_{α})C(O)—R₇, in which R₇ is as defined above and R_{α} is alkyl. As used herein, the term “nitro” means —NO₂; the term “halogen” designates —F, —Cl, —Br or —I; the term “sulfhydryl” means —SH; and the term “hydroxyl” means —OH.

[0107] The term “aryl” as used herein includes 5-, 6- and 7-membered aromatic groups that may include from zero to four heteroatoms in the ring, for example, phenyl, pyrrolyl, furyl, thiophenyl, imidazolyl, oxazole, thiazolyl, triazolyl, pyrazolyl, pyridyl, pyrazinyl, pyridazinyl and pyrimidinyl, and the like. Those aryl groups having heteroatoms in the ring structure may also be referred to as “aryl heterocycles” or “heteroaromatics.” The aromatic ring can be substituted at one or more ring positions with such substituents as described above, as for example, halogen, azide, alkyl, aralkyl, alkenyl, alkynyl, cycloalkyl, hydroxyl, amino, nitro, sulfhydryl, imino, amido, phosphonate, phosphinate, carbonyl, carboxyl, silyl, ether, alkylthio, sulfonyl, sulfonamido, ketone, aldehyde, ester, a heterocyclyl, an aromatic or heteroaromatic moiety, —CF₃, —CN, or the like. Aryl groups can also be part of a polycyclic group. For example, aryl groups include fused aromatic moieties such as naphthyl, anthracenyl, quinolyl, indolyl, and the like.

[0108] In some embodiments, the molecular weight of a modifying group should be at or below about 40,000 Daltons. In some embodiments, the molecular weight ranges from about 100 Daltons to about 40,000 Daltons, from about 300 Daltons to about 30,000 Daltons, from about 200 Daltons to about 20,000 Daltons, from about 200 Daltons to about 10,000 Daltons, from about 300 Daltons to about 5,000 Daltons, from about 500 Daltons to about 500 Daltons, or any range therein. It is to be appreciated that one skilled in the art should recognize that some of the groups, subgroups, and individual biobeneficial agents may not be used in some embodiments of the present invention.

### Functional Enhancement

[0109] An IP-10 chemokine analog compound of the invention may be further modified to alter the specific properties of the compound while retaining the desired functionality of the compound. For example, in one embodiment, the compound may be modified to alter a pharmacokinetic property of the compound, such as in vivo stability, solubility, bioavailability or half-life. The compound may be modified to label the compound with a detectable substance. In addition, the compound may be modified to couple the compound to an additional therapeutic moiety.

[0110] To further chemically modify the compound, such as to alter its pharmacokinetic properties, reactive groups can be derivatized. For example, when the modifying group is attached to the amino-terminal end of the IP-10 core domain, the carboxy-terminal end of the compound may be further modified. Potential C-terminal modifications include those that reduce the ability of the compound to act as a substrate for carboxypeptidases. Examples of C-terminal modifiers include an amide group, an ethylamide group and various non-natural amino acids, such as D-amino acids, β-alanine, C-terminal decarboxylation, and a C-terminal alcohol. Alternatively, when the modifying group is attached to the carboxy-terminal end of the aggregation core domain, the amino-terminal end of the compound may be further modified, for example, to reduce the ability of the compound to act as a substrate for aminopeptidases.

[0111] IP-10 chemokines and IP-10 analogs of the invention may be modified by the addition of polyethylene glycol (PEG). PEG modification may lead to improved circulation time, improved solubility, improved resistance to proteolysis, reduced antigenicity and immunogenicity, improved bioavailability, reduced toxicity, improved stability, and easier formulation (For a review see, Francis et al., International Journal of Hematology 68:1-18, 1998). PEGylation may also result in a substantial reduction in bioactivity. In some embodiments, the molecular weight of the PEG can be 40,000 Daltons or less, 30,000 Daltons or less, 20,000 Daltons or less, 10,000 Daltons or less, 5000 Daltons or less, 3000 Daltons or less 1000 Daltons or less, or any range therein. In some embodiments, the molecular weight of the PEG can range from about 100 Daltons to about 20,000 Daltons, from about 200 Daltons to about 5,000 Daltons, from about 300 Daltons to about 3000 Daltons, from about 400 Daltons to about 2000 Daltons, from about 500 Daltons to about 1000 Daltons, or any range therein.

[0112] The IP-10 analogs of the invention may also be coupled to a radioisotope such as yttrium-90, F-18 or iodine-131 for therapeutic purposes (see, e.g., DeNardo et al., “Choosing an optimal radioimmunotherapy dose for clinical response,” Cancer 94(4 Suppl): 1275-86, 2002; Kaltsas et al., “The value of radiolabelled MIBG and octreotide in the diagnosis and management of neuroendocrine tumours,” Ann Oncol 12 Suppl 2:S47-50, 2001).

[0113] An IP-10 chemokine mimetic compound can be further modified to label the compound by combining the compound with a detectable substance. In some aspects of the invention, suitable detectable substances include various enzymes, prosthetic groups, fluorescent materials, luminescent materials, light scattering or plasmon resonant materials, and radioactive materials. Modifying groups may also include groups comprising biochemical labels or structures, such as biotin, a diethylene-triaminepentaacetyl group, a (O)-menthoxyacetyl group, a N-acetylneuraminyl group, a cholyl structure or an iminobiotinyl group.

[0114] Examples of suitable enzymes include horseradish peroxidase, alkaline phosphatase, beta-galactosidase, or acetylcholinesterase. Examples of suitable prosthetic groups which are members of a binding pair and are capable of forming complexes include streptavidin/biotin, avidin/biotin and an antigen/antibody complex (e.g., rabbit IgG and anti-rabbit IgG).

[0115] Examples of suitable fluorescent materials include umbelliferone, fluorescein, fluorescein isothiocyanate, rhodamine, dichlorotriazinylamine fluorescein, dansyl chloride or phycoerythrin and energy transfer fluorescent dyes. An example of a luminescent material includes luminol. Examples of light scattering or plasmon resonant materials include gold or silver particles and quantum dots. Examples of suitable radioactive material include ¹⁴C, ¹²³I, ¹²⁴I, ¹²⁵I, ¹³¹I, Tc99m, ³⁵S or ³H. A chemokine mimetic compound may be radioactively labeled with ¹⁴C, either by incorporation of ¹⁴C into the modifying group or one or more amino acid structures in the chemokine mimetic compound.

[0116] Labeled chemokine mimetic compounds may be used to assess the in vivo pharmacokinetics of the compounds, as well as to detect disease progression or propensity of a subject to develop a disease, for example for diagnostic purposes. Tissue distribution can be detected using a labeled chemokine mimetic compound either in vivo or in an in vitro sample derived from a subject. A modifying group can be chosen that provides a site at which a chelation group for the label can be introduced, such as the Aic derivative of cholic acid, which has a free amino group. For example, a tyrosine residue within IP-10 sequence may be substituted with radioactive iodotyrosyl. Any of the various isotopes of radioactive iodine may be incorporated to create a diagnostic or therapeutic agent. For example, a chemokine mimetic compound of the invention may be labeled with radioactive technetium or iodine for use as a diagnostic agent: ¹²³I (half-life=13.2 hours) may be used for whole body scintigraphy, ¹²⁴I (half life=4 days) may be used for positron emission tomography (PET), ¹²⁵I (half life=60 days) may be used for metabolic turnover studies and ¹³¹I (half life=8 days) may be used for whole body counting and delayed low resolution imaging studies.

[0117] In some embodiments, the IP-10 analog may be modified at its carboxy terminus with a cholyl group according to methods known in the art. Cholyl derivatives and analogs may also be used as modifying groups. For example, a preferred cholyl derivative is Aic (3-(O-aminoethyl-iso)-cholyl), which has a free amino group that can be used to further modify the chemokine mimetic compound. A modifying group may be a “biotinyl structure,” which includes biotinyl groups and analogues and derivatives thereof (such as a 2-iminobiotinyl group).

[0118] In some embodiments, the modifying group may comprise a fluorescent-label group, e.g., a fluorescein-containing group, such as a group derived from reacting an IP-10 derived peptidic structure with 5-(and 6-)-carboxyfluorescein, succinimidyl ester or fluorescein isothiocyanate. The IP-10 analogs may also be modified by attaching other fluorescent labels including rhodamine, dichlorotriazinylamine fluorescein, dansyl chloride or phycoerythrin and energy transfer fluorescent dyes or fluorescent ion indicators.

[0119] In various embodiments, the modifying group(s) may comprise an N-acetylneuraminyl group, a trans-4-cotininecarboxyl group, a 2-imino-1-imidazolidineacetyl group, an (S)-(-)-indoline-2-carboxyl group, a (-)-menthoxyacetyl group, a 2-norbornaneacetyl group, a γ-oxo-5-acenaphthenebutyryl, a (-)-2-oxo-4-thiazolidinecarboxyl group, a tetrahydro-3-furoyl group, a 2-iminobiotinyl group, a diethylenetriaminepentaacetyl group, a 4-morpholinecarbonyl group, a 2-thiopheneacetyl group or a 2-thiophenesulfonyl group.

[0120] In some embodiments, light scattering groups, magnetic groups, nanogold, peptides, proteins, a solid matrix, radiolabels, or carbohydrates may be attached. In some embodiments, the modifying group may be an oligomer such as, for example, an oligonucleotide, or an oligopeptide (which may or may not be derived from an IP-10 chemokine). In some embodiments, the modifying group can include a polysaccharide, a glycosaminoglycan, a poly(alkylene glycol), or a combination thereof.

[0121] In some embodiments, the modifying group can be an RDG or RGD peptide, a hydrolyzable chemical moiety for a prodrug form of the IP-10 analog, or another therapeutic agent connected to the IP-10 analog through a hydrolysable chemical moiety to form a codrug form of the IP-10 analog. The prodrugs and codrugs are capable of being transformed, upon metabolism in vivo, into an IP-10 analog agonist or antagonist. Such a form of a modifying group can be referred to as a “secondary modifying group.” A variety of strategies are known in the art for preparing peptide prodrugs and codrugs that limit metabolism in order to optimize delivery of the active form of the peptide-based drug.

IP-10 Sequence Listines:

[0122] Using the teachings provided herein, one of skill can create a variety of IP-10 analogs. Preferred embodiments of linear IP-10 analogs of the present invention corresponding to a portion of N-terminal have the following structures, wherein the underlined residues are cyclized, and in some embodiments the cyclization may include, for example, formation of a disulphide bond, an alkenyl bond, an ether bond, or a lactam; and, any additional amino acids identified in square brackets in a header indicates that the peptide described by the header is at least an analog of a native fragment, and the position of the amino acid substitutions are noted by the standard abbreviation for the amino acid substituent with a superscript number indicating the residue positions at which the modification has occurred, corresponding to the native sequence:

IP-10-(1-14) acid or amide
(SEQ ID NO:163)
b1) RNH-Val-Pro-Leu-Ser-Arg-Thr-Val-Arg-Cys-Thr-Cys-Ile-Ser-Ile-(OH)NH₂
(SEQ ID NO:164)
b2) RNH-Val-Pro-Xaa₃-Ser-Arg-Thr-Val-Arg-Xaa₁-Thr-Xaa₂-Ile-Ser-Ile-(OH)NH₂
(SEQ ID NO:165)
b3) RNH-Val-Pro-Leu-Xaa₃-Arg-Thr-Val-Arg-Xaa₁-Thr-Xaa₂-Ile-Ser-Ile-(OH)NH₂
(SEQ ID NO:166)
b4) RNH-Val-Pro-Leu-Ser-Xaa₃-Thr-Val-Arg-Xaa₁-Thr-Xaa₂-Ile-Ser-Ile-(OH)NH₂
(SEQ ID NO:167)
b5) RNH-Val-Pro-Leu-Ser-Arg-Xaa₃-Val-Arg-Xaa₁-Thr-Xaa₂-Ile-Ser-Ile-(OH)NH₂
(SEQ ID NO:168)
b6) RNH-Val-Pro-Leu-Ser-Arg-Thr-Xaa₃-Arg-Xaa₁-Thr-Xaa₂-Ile-Ser-Ile-(OH)NH₂
(SEQ ID NO:169)
b7) RNH-Val-Pro-Leu-Ser-Arg-Thr-VaI-Arg-Xaa₃-Xaa₁-Thr-Xaa₂-lle-Ser-Ile-
(OH)NH₂
IP-10-(1-17) acid or amide
(SEQ ID NO:170)
b8) RNH-Val-Pro-Leu-Ser-Arg-Thr-Val-Arg-Cys-Thr-Cys-Ile-Ser-Ile-Ser-Asn-Gln-
(OH)NH₂
(SEQ ID NO:171)
b9) RNH-Val-Pro-Xaa₃-Ser-Arg-Thr-Val-Arg-Xaa₁-Thr-Xaa₂-Ile-Ser-Ile-Ser-Asn-
Gln-(OH)NH₂
(SEQ ID NO:172)
b10) RNH-Val-Pro-Leu-Xaa₃-Arg-Thr-Val-Arg-Xaa₁-Thr-Xaa₂-Ile-Ser-Ile-Ser-Asn-
Gln-(OH)NH₂
(SEQ ID NO:173)
b11) RNH-Val-Pro-Leu-Ser-Xaa₃-Thr-Val-Arg-Xaa₁-Thr-Xaa₂-Ile-Ser-Ile-Ser-Asn-
Gln-(OH)NH₂
(SEQ ID NO:174)
b12) RNH-Val-Pro-Leu-Ser-Arg-Xaa₃-Val-Arg-Xaa₁-Thr-Xaa₂-Ile-Ser-Ile-Ser-Asn-
Gln-(OH)NH₂
(SEQ ID NO:175)
b13) RNH-Val-Pro-Leu-Ser-Arg-Thr-Xaa₃-Arg-Xaa₁-Thr-Xaa₂-Ile-Ser-Ile-Ser-Asn-
Gln-(OH)NH₂
(SEQ ID NO:176)
b14) RNH-Val-Pro-Leu-Ser-Arg-Thr-Val-Arg-Xaa₃-Xaa₁-Thr-Xaa₂-Ile-Ser-Ile-Ser-
Asn-Gln-(OH)NH₂

[0123] Preferred embodiments of linear IP-10 analogs of the present invention corresponding to a portion of the internal region of IP-10 having the following structures:

[A¹¹]-IP-10-(11-35) acid or amide
(SEQ ID NO:177)
b15) RNH-Ala-Ile-Ser-Ile-Ser-Asn-Gln-Pro-Val-Asn-Pro-Arg-Ser-Leu-Glu-Lys-Leu-
Glu-Ile-Ile-Pro-Ala-Ser-Gln-Phe-(OH)NH₂

[0124] Preferred embodiments of linear IP-10 analogs of the present invention corresponding to a portion of the N-terminal region and the internal region of IP-10 having the following structures:

IP-10-(1-35) acid or amide
(SEQ ID NO:178)
b16) RNH-Val-Pro-Leu-Ser-Arg-Thr-Val-Arg-Cys-Thr-Cys-Ile-Ser-Ile-Ser-Asn-Gln-
Pro-Val-Asn-Pro-Arg-Ser-Leu-Glu-Lys-Leu-Glu-Ile-Ile-Pro-Ala-Ser-Gln-Phe-
(OH)NH₂
(SEQ ID NO:179)
b17) RNH-Xaa₃-Pro-Leu-Ser-Arg-Thr-Val-Arg-Xaa₁-Thr-Xaa₂-Ile-Ser-Ile-Ser-Asn-
Gln-Pro-Val-Asn-Pro-Arg-Ser-Leu-Glu-Lys-Leu-Glu-Ile-Ile-Pro-Ala-Ser-Gln-Phe-
(OH)NH₂
(SEQ ID NO:180)
b18) RNH-Val-Xaa₃-Leu-Ser-Arg-Thr-Val-Arg-Xaa₁-Thr-Xaa₂-Ile-Ser-Ile-Ser-Asn-
Gln-Pro-Val-Asn-Pro-Arg-Ser-Leu-Glu-Lys-Leu-Glu-Ile-Ile-Pro-Ala-Ser-Gln-Phe-
(OH)NH₂
(SEQ ID NO:181)
b19) RNH-Val-Pro-Xaa₃-Ser-Arg-Thr-Val-Arg-Xaa₁-Thr-Xaa₂-Ile-Ser-Ile-Ser-Asn-
Gln-Pro-Val-Asn-Pro-Arg-Ser-Leu-Glu-Lys-Leu-Glu-Ile-Ile-Pro-Ala-Ser-Gln-Phe-
(OH)NH₂
(SEQ ID NO:182)
b20) RNH-Val-Pro-Leu-Xaa₃-Arg-Thr-Val-Arg-Xaa₁-Thr-Xaa₂-Ile-Ser-Ile-Ser-Asn-
Gln-Pro-Val-Asn-Pro-Arg-Ser-Leu-Glu-Lys-Leu-Glu-Ile-Ile-Pro-Ala-Ser-Gln-Phe-
(OH)NH₂
(SEQ ID NO:183)
b21) RNH-Val-Pro-Leu-Ser-Xaa₃-Thr-Val-Arg-Xaa₁-Thr-Xaa₂-Ile-Ser-Ile-Ser-Asn-
Gln-Pro-Val-Asn-Pro-Arg-Ser-Leu-Glu-Lys-Leu-Glu-Ile-Ile-Pro-Ala-Ser-Gln-Phe-
(OH)NH₂
(SEQ ID NO:184)
b22) RNH-Val-Pro-Leu-Ser-Arg-Xaa₃-Val-Arg-Xaa₁-Thr-Xaa₂-Ile-Ser-Ile-Ser-Asn-
Gln-Pro-Val-Asn-Pro-Arg-Ser-Leu-Glu-Lys-Leu-Glu-Ile-Ile-Pro-Ala-Ser-Gln-Phe-
(OH)NH₂
(SEQ ID NO:185)
b23) RNH-Val-Pro-Leu-Ser-Arg-Thr-Xaa₃-Arg-Xaa₁-Thr-Xaa₂-Ile-Ser-Ile-Ser-Asn-
Gln-Pro-Val-Asn-Pro-Arg-Ser-Leu-Glu-Lys-Leu-Glu-Ile-Ile-Pro-Ala-Ser-Gln-Phe-
(OH)NH₂
(SEQ ID NO:186)
b24) RNH-Val-Pro-Leu-Ser-Arg-Thr-Val-Xaa₃-Xaa₁-Thr-Xaa₂-Ile-Ser-Ile-Ser-Asn-
Gln-Pro-Val-Asn-Pro-Arg-Ser-Leu-Glu-Lys-Leu-Glu-Ile-Ile-Pro-Ala-Ser-Gln-Phe-
(OH)NH₂

[0125] Preferred embodiments of linear IP-10 analogs of the present invention corresponding to a portion of the C-terminal region of IP-10 having the following sequence:

IP-10-(53-77) acid or amide
(SEQ ID NO:187)
b25) RNH-Leu-Asn-Pro-Glu-Ser-Lys-Ala-Ile-Lys-Asn-Leu-Leu-Lys-Ala-Val-Ser-
Lys-Glu-Met-Ser-Lys-Arg-Ser-Pro-(OH)NH₂

[0126] Preferred embodiments of cyclic IP-10 analogs of the present invention corresponding to a portion of the N-terminal region joined with a linker to a cyclic portion of the C-terminal region of IP-10 having the following structures:

IP-10-(1-14)-[linker]-IP-10-(65-77)-acid or amide
(SEQ ID NO:188)
b26) RNH-Val-Pro-Leu-Ser-Arg-Thr-Val-Arg-Cys-Thr-Cys-Ile-Ser-Ile-[linker]-Leu-
Lys-Ala-Val-Ser-Lys-Glu-Met-Ser-Lys-Arg-Ser-Pro-(OH)NH₂
(SEQ ID NO:189)
b27) RNH-Xaa₃-Pro-Leu-Ser-Arg-Thr-Val-Arg-Xaa₁-Thr-Xaa₂-Ile-Ser-Ile-[linker]-
Leu-Lys-Ala-Val-Ser-Lys-Glu-Met-Ser-Lys-Arg-Ser-Pro-(OH)NH₂
(SEQ ID NO:190)
b28) RNH-Val-Xaa₃-Leu-Ser-Arg-Thr-Val-Arg-Xaa₁-Thr-Xaa₂-Ile-Ser-Ile-[linker]-
Leu-Lys-Ala-Val-Ser-Lys-Glu-Met-Ser-Lys-Arg-Ser-Pro-(OH)NH₂
(SEQ ID NO:191)
b29) RNH-Val-Pro-Xaa₃-Ser-Arg-Thr-Val-Arg-Xaa₁-Thr-Xaa₂-Ile-Ser-Ile-[linker]-
Leu-Lys-Ala-Val-Ser-Lys-Glu-Met-Ser-Lys-Arg-Ser-Pro-(OH)NH₂
(SEQ ID NO:192)
b30) RNH-Val-Pro-Leu-Xaa₃-Arg-Thr-Val-Arg-Xaa₁-Thr-Xaa₂-Ile-Ser-Ile-[linker]-
Leu-Lys-Ala-Val-Ser-Lys-Glu-Met-Ser-Lys-Arg-Ser-Pro-(OH)NH₂
(SEQ ID NO:193)
b31) RNH-Val-Pro-Leu-Ser-Xaa₃-Thr-Val-Arg-Xaa₁-Thr-Xaa₂-Ile-Ser-Ile-[linker]-
Leu-Lys-Ala-Val-Ser-Lys-Glu-Met-Ser-Lys-Arg-Ser-Pro-(OH)NH₂
(SEQ ID NO:194)
b32) RNH-Val-Pro-Leu-Ser-Arg-Xaa₃-Val-Arg-Xaa₁-Thr-Xaa₂-Ile-Ser-Ile-[linker]-
Leu-Lys-Ala-Val-Ser-Lys-Glu-Met-Ser-Lys-Arg-Ser-Pro-(OH)NH₂
(SEQ ID NO:195)
b33) RNH-Val-Pro-Leu-Ser-Arg-Thr-Xaa₃-Arg-Xaa₁-Thr-Xaa₂-Ile-Ser-Ile-[linker]-
Leu-Lys-Ala-Val-Ser-Lys-Glu-Met-Ser-Lys-Arg-Ser-Pro-(OH)NH₂
(SEQ ID NO:196)
b34) RNH-Val-Pro-Leu-Ser-Arg-Thr-Val-Xaa₃-Xaa₁-Thr-Xaa₂-Ile-Ser-Ile-[linker]-
Leu-Lys-Ala-Val-Ser-Lys-Glu-Met-Ser-Lys-Arg-Ser-Pro-(OH)NH₂
(SEQ ID NO:197)
b35) RNH-Val-Pro-Leu-Ser-Arg-Thr-Val-Arg-Cys-Thr-Cys-Xaa₄-Ser-Ile-[linker]-
Leu-Lys-Ala-Val-Ser-Lys-Glu-Met-Ser-Lys-Arg-Ser-Pro-(OH)NH₂
(SEQ ID NO:198)
b36) RNH-Xaa₃-Pro-Leu-Ser-Arg-Thr-Val-Arg-Xaa₁-Thr-Xaa₂-Xaa₄-Ser-Ile-[linker]-
Leu-Lys-Ala-Val-Ser-Lys-Glu-Met-Ser-Lys-Arg-Ser-Pro-(OH)NH₂
(SEQ ID NO:199)
b37) RNH-Val-Xaa₃-Leu-Ser-Arg-Thr-Val-Arg-Xaa₁-Thr-Xaa₂-Xaa₄-Ser-Ile-[linker]-
Leu-Lys-Ala-Val-Ser-Lys-Glu-Met-Ser-Lys-Arg-Ser-Pro-(OH)NH₂
(SEQ ID NO:200)
b38) RNH-Val-Pro-Xaa₃-Ser-Arg-Thr-Val-Arg-Xaa₁-Thr-Xaa₂-Xaa₄-Ser-Ile-[linker]-
Leu-Lys-Ala-Val-Ser-Lys-Glu-Met-Ser-Lys-Arg-Ser-Pro-(OH)NH₂
(SEQ ID NO:201)
b39) RNH-Val-Pro-Leu-Xaa₃-Arg-Thr-Val-Arg-Xaa₁-Thr-Xaa₂-Xaa₄-Ser-Ile-[linker]-
Leu-Lys-Ala-Val-Ser-Lys-Glu-Met-Ser-Lys-Arg-Ser-Pro-(OH)NH₂
(SEQ ID NO:202)
b40) RNH-Val-Pro-Leu-Ser-Xaa₃-Thr-Val-Arg-Xaa₁-Thr-Xaa₂-Xaa₄-Ser-Ile-[linker]-
Leu-Lys-Ala-Val-Ser-Lys-Glu-Met-Ser-Lys-Arg-Ser-Pro-(OH)NH₂
(SEQ ID NO:203)
b41) RNH-Val-Pro-Leu-Ser-Arg-Xaa₃-Val-Arg-Xaa₁-Thr-Xaa₂-Xaa₄-Ser-Ile-[linker]-
Leu-Lys-Ala-Val-Ser-Lys-Glu-Met-Ser-Lys-Arg-Ser-Pro-(OH)NH₂
(SEQ ID NO:204)
b42) RNH-Val-Pro-Leu-Ser-Arg-Thr-Xaa₃-Arg-Xaa₁-Thr-Xaa₂-Xaa₄-Ser-Ile-[linker]-
Leu-Lys-Ala-Val-Ser-Lys-Glu-Met-Ser-Lys-Arg-Ser-Pro-(OH)NH₂
(SEQ ID NO:205)
b43) RNH-Val-Pro-Leu-Ser-Arg-Thr-Val-Xaa₃-Xaa₁-Thr-Xaa₂-Xaa₄-Ser-Ile-[linker]-
Leu-Lys-Ala-Val-Ser-Lys-Glu-Met-Ser-Lys-Arg-Ser-Pro-(OH)NH₂
(SEQ ID NO:206)
b44) RNH-Val-Pro-Leu-Ser-Arg-Thr-Val-Arg-Cys-Thr-Cys-Ile-Xaa₄-Ile-[linker]-
Leu-Lys-Ala-Val-Ser-Lys-Glu-Met-Ser-Lys-Arg-Ser-Pro-(OH)NH₂
(SEQ ID NO:207)
b45) RNH-Xaa₃-Pro-Leu-Ser-Arg-Thr-Val-Arg-Xaa₁-Thr-Xaa₂-Ile-Xaa₄-Ile-[linker]-
Leu-Lys-Ala-Val-Ser-Lys-Glu-Met-Ser-Lys-Arg-Ser-Pro-(OH)NH₂
(SEQ ID NO:208)
b46) RNH-Val-Xaa₃-Leu-Ser-Arg-Thr-Val-Arg-Xaa₁-Thr-Xaa₂-Ile-Xaa₄-Ile-[linker]-
Leu-Lys-Ala-Val-Ser-Lys-Glu-Met-Ser-Lys-Arg-Ser-Pro-(OH)NH₂
(SEQ ID NO:209)
b47) RNH-Val-Pro-Xaa₃-Ser-Arg-Thr-Val-Arg-Xaa₁-Thr-Xaa₂-Ile-Xaa₄-Ile-[linker]-
Leu-Lys-Ala-Val-Ser-Lys-Glu-Met-Ser-Lys-Arg-Ser-Pro-(OH)NH₂
(SEQ ID NO:210)
b48) RNH-Val-Pro-Leu-Xaa₃-Arg-Thr-Val-Arg-Xaa₁-Thr-Xaa₂-Ile-Xaa₄-Ile-[linker]-
Leu-Lys-Ala-Val-Ser-Lys-Glu-Met-Ser-Lys-Arg-Ser-Pro-(OH)NH₂
(SEQ ID NO:211)
b49) RNH-Val-Pro-Leu-Ser-Xaa₃-Thr-Val-Arg-Xaa₁-Thr-Xaa₂-Ile-Xaa₄-Ile-[linker]-
Leu-Lys-Ala-Val-Ser-Lys-Glu-Met-Ser-Lys-Arg-Ser-Pro-(OH)NH₂
(SEQ ID NO:212)
b50) RNH-Val-Pro-Leu-Ser-Arg-Xaa₃-Val-Arg-Xaa₁-Thr-Xaa₂-Ile-Xaa₄-Ile-[linker]-
Leu-Lys-Ala-Val-Ser-Lys-Glu-Met-Ser-Lys-Arg-Ser-Pro-(OH)NH₂
(SEQ ID NO:213)
b51) RNH-Val-Pro-leu-Ser-Arg-Thr-Xaa₃-Arg-Xaa₁-Thr-Xaa₂-Ile-Xaa₄-Ile-[linker]-
Leu-Lys-Ala-Val-Ser-Lys-Glu-Met-Ser-Lys-Arg-Ser-Pro-(OH)NH₂
(SEQ ID NO:214)
b52) RNH-Val-Pro-Leu-Ser-Arg-Thr-Val-Xaa₃-Xaa₁-Thr-Xaa₂-Ile-Xaa₄-Ile-[linker]-
Leu-Lys-Ala-Val-Ser-Lys-Glu-Met-Ser-Lys-Arg-Ser-Pro-(OH)NH₂
(SEQ ID NO:215)
b53) RNH-Val-Pro-Leu-Ser-Arg-Thr-Val-Arg-Cys-Thr-Cys-Ile-Ser-Xaa₄-[linker]-
Leu-Lys-Ala-Val-Ser-Lys-Glu-Met-Ser-Lys-Arg-Ser-Pro-(OH)NH₂
(SEQ ID NO:216)
b54) RNH-Xaa₃-Pro-Leu-Ser-Arg-Thr-Val-Arg-Xaa₁-Thr-Xaa₂-Ile-Ser-Xaa₄-[linker]-
Leu-Lys-Ala-Val-Ser-Lys-Glu-Met-Ser-Lys-Arg-Ser-Pro-(OH)NH₂
(SEQ ID NO:217)
b55) RNH-Val-Xaa₃-Leu-Ser-Arg-Thr-Val-Arg-Xaa₁-Thr-Xaa₂-Ile-Ser-Xaa₄-[linker]-
Leu-Lys-Ala-Val-Ser-Lys-Glu-Met-Ser-Lys-Arg-Ser-Pro-(OH)NH₂
(SEQ ID NO:218)
b56) RNH-Val-Pro-Xaa₃-Ser-Arg-Thr-Val-Arg-Xaa₁-Thr-Xaa₂-Ile-Ser-Xaa₄-[linker]-
Leu-Lys-Ala-Val-Ser-Lys-Glu-Met-Ser-Lys-Arg-Ser-Pro-(OH)NH₂
(SEQ ID NO:219)
b57) RNH-Val-Pro-Leu-Xaa₃-Arg-Thr-Val-Arg-Xaa₁-Thr-Xaa₂-Ile-Ser-Xaa₄-[linker]-
Leu-Lys-Ala-Val-Ser-Lys-Glu-Met-Ser-Lys-Arg-Ser-Pro-(OH)NH₂
(SEQ ID NO:220)
b58) RNH-Val-Pro-Leu-Ser-Xaa₃-Thr-Val-Arg-Xaa₁-Thr-Xaa₂-Ile-Ser-Xaa₄-[linker]-
Leu-Lys-Ala-Val-Ser-Lys-Glu-Met-Ser-Lys-Arg-Ser-Pro-(OH)NH₂
(SEQ ID NO:221)
b59) RNH-Val-Pro-Leu-Ser-Arg-Xaa₃-Val-Arg-Xaa₁-Thr-Xaa₂-Ile-Ser-Xaa₄-[linker]-
Leu-Lys-Ala-Val-Ser-Lys-Glu-Met-Ser-Lys-Arg-Ser-Pro-(OH)NH₂
(SEQ ID NO:222)
b60) RNH-Val-Pro-Leu-Ser-Arg-Thr-Xaa₃-Arg-Xaa₁-Thr-Xaa₂-Ile-Ser-Xaa₄-[linker]-
Leu-Lys-Ala-Val-Ser-Lys-Glu-Met-Ser-Lys-Arg-Ser-Pro-(OH)NH₂
(SEQ ID NO:223)
b61) RNH-Val-Pro-Leu-Ser-Arg-Thr-Val-Xaa₃-Xaa₁-Thr-Xaa₂-Ile-Ser-Xaa₄-[linker]-
Leu-Lys-Ala-Val-Ser-Lys-Glu-Met-Ser-Lys-Arg-Ser-Pro-(OH)NH₂
IP-10-(1-14)-[linker]-IP-10-(54-66)-acid or amide
(SEQ ID NO:224)
b62) RNH-Val-Pro-Leu-Ser-Arg-Thr-Val-Arg-Cys-Thr-Cys-Ile-Ser-Ile-[linker]-Leu-
Asn-Pro-Glu-Ser-Lys-Ala-Ile-Lys-Asn-Leu-Leu-Lys-(OH)NH₂
(SEQ ID NO:225)
b63) RNH-Xaa₃-Pro-Leu-Ser-Arg-Thr-Val-Arg-Xaa₁-Thr-Xaa₂-Ile-Ser-Ile-[linker]-
Leu-Asn-Pro-Glu-Ser-Lys-Ala-Ile-Lys-Asn-Leu-Leu-Lys-(OH)NH₂
(SEQ ID NO:226)
b64) RNH-Val-Xaa₃-Leu-Ser-Arg-Thr-Val-Arg-Xaa₁-Thr-Xaa₂-Ile-Ser-Ile-[linker]-
Leu-Asn-Pro-Glu-Ser-Lys-Ala-Ile-Lys-Asn-Leu-Leu-Lys-(OH)NH₂
(SEQ ID NO:227)
b65) RNH-Val-Pro-Xaa₃-Ser-Arg-Thr-Val-Arg-Xaa₁-Thr-Xaa₂-Ile-Ser-Ile-[linker]-
Leu-Asn-Pro-Glu-Ser-Lys-Ala-Ile-Lys-Asn-Leu-Leu-Lys-(OH)NIH2
(SEQ ID NO:228)
b66) RNH-Val-Pro-Leu-Xaa₃-Arg-Thr-Val-Arg-Xaa₁-Thr-Xaa₂-Ile-Ser-Ile-[linker]-
Leu-Asn-Pro-Glu-Ser-Lys-Ala-Ile-Lys-Asn-Leu-Leu-Lys-(OH)NH₂
(SEQ ID NO:229)
b67) RNH-Val-Pro-Leu-Ser-Xaa₃-Thr-Val-Arg-Xaa₁-Thr-Xaa₂-Ile-Ser-Ile-[linker]-
Leu-Asn-Pro-Glu-Ser-Lys-Ala-Ile-Lys-Asn-Leu-Leu-Lys-(OH)NH₂
(SEQ ID NO:230)
b68) RNH-Val-Pro-Leu-Ser-Arg-Xaa₃-Val-Arg-Xaa₁-Thr-Xaa₂-Ile-Ser-Ile-[linker]-
Leu-Asn-Pro-Glu-Ser-Lys-Ala-Ile-Lys-Asn-Leu-Leu-Lys-(OH)NH₂
(SEQ ID NO:231)
b69) RNH-Val-Pro-Leu-Ser-Arg-Thr-Xaa₃-Arg-Xaa₁-Thr-Xaa₂-Ile-Ser-Ile-[linker]-
Leu-Asn-Pro-Glu-Ser-Lys-Ala-Ile-Lys-Asn-Leu-Leu-Lys-(OH)NH₂
(SEQ ID NO:232)
b70) RNH-Val-Pro-Leu-Ser-Arg-Thr-Val-Xaa₃-Xaa₁-Thr-Xaa₂-Ile-Ser-Ile-[linker]-
Leu-Asn-Pro-Glu-Ser-Lys-Ala-Ile-Lys-Asn-Leu-Leu-Lys-(OH)NH₂
(SEQ ID NO:233)
b71) RNH-Val-Pro-Leu-Ser-Arg-Thr-Val-Arg-Cys-Thr-Cys-Xaa₄-Ser-Ile-[linker]-
Leu-Asn-Pro-Glu-Ser-Lys-Ala-Ile-Lys-Asn-Leu-Leu-Lys-(OH)NH₂
(SEQ ID NO:234)
b72) RNH-Xaa₃-Pro-Leu-Ser-Arg-Thr-Val-Arg-Xaa₁-Thr-Xaa₂-Xaa₄-Ser-Ile-[linker]-
Leu-Asn-Pro-Glu-Ser-Lys-Ala-Ile-Lys-Asn-Leu-Leu-Lys-(OH)NH₂
(SEQ ID NO:235)
b73) RNH-Val-Xaa₃-Leu-Ser-Arg-Thr-Val-Arg-Xaa₁-Thr-Xaa₂-Xaa₄-Ser-Ile-[linker]-
Leu-Asn-Pro-Glu-Ser-Lys-Ala-Ile-Lys-Asn-Leu-Leu-Lys-(OH)NH₂
(SEQ ID NO:236)
b74) RNH-Val-Pro-Xaa₃-Ser-Arg-Thr-Val-Arg-Xaa₁-Thr-Xaa₂-Xaa₄-Ser-Ile-[linker]-
Leu-Asn-Pro-Glu-Ser-Lys-Ala-Ile-Lys-Asn-Leu-Leu-Lys-(OH)NH₂
(SEQ ID NO:237)
b75) RNH-Val-Pro-Leu-Xaa₃-Arg-Thr-Val-Arg-Xaa₁-Thr-Xaa₂-Xaa₄-Ser-Ile-[linker]-
Leu-Asn-Pro-Glu-Ser-Lys-Ala-Ile-Lys-Asn-Leu-Leu-Lys-(OH)NH₂
(SEQ ID NO:238)
b76) RNH-Val-Pro-Leu-Ser-Xaa₃-Thr-Val-Arg-Xaa₁-Thr-Xaa₂-Xaa₄-Ser-Ile-[linker]-
Leu-Asn-Pro-Glu-Ser-Lys-Ala-Ile-Lys-Asn-Leu-Leu-Lys-(OH)NH₂
(SEQ ID NO:239)
b77) RNH-Val-Pro-Leu-Ser-Arg-Xaa₃-Val-Arg-Xaa₁-Thr-Xaa₂-Xaa₁-Ser-Ile-[linker]-
Leu-Asn-Pro-Glu-Ser-Lys-Ala-Ile-Lys-Asn-Leu-Leu-Lys-(OH)NH₂
(SEQ ID NO:240)
b78) RNH-Val-Pro-Leu-Ser-Arg-Thr-Xaa₃-Arg-Xaa₁-Thr-Xaa₂-Xaa₁-Ser-Ile-[linker]-
Leu-Asn-Pro-Glu-Ser-Lys-Ala-Ile-Lys-Asn-Leu-Leu-Lys-(OH)NH₂
(SEQ ID NO:241)
b79) RNH-Val-Pro-Leu-Ser-Arg-Thr-Val-Xaa₃-Xaa₁-Thr-Xaa₂-Xaa₁-Ser-Ile-[linker]-
Leu-Asn-Pro-Glu-Ser-Lys-Ala-Ile-Lys-Asn-Leu-Leu-Lys-(OH)NH₂
(SEQ ID NO:242)
b80) RNH-Val-Pro-Leu-Ser-Arg-Thr-Val-Arg-Cys-Thr-Cys-Ile-Xaa₄-Ile-[linker]-
Leu-Asn-Pro-Glu-Ser-Lys-Ala-Ile-Lys-Asn-Leu-Leu-Lys-(OH)NH₂
(SEQ ID NO:243)
b81) RNH-Xaa₃-Pro-Leu-Ser-Arg-Thr-Val-Arg-Xaa₁-Thr-Xaa₂-Ile-Xaa₄-Ile-[linker]-
Leu-Asn-Pro-Glu-Ser-Lys-Ala-Ile-Lys-Asn-Leu-Leu-Lys-(OH)NH₂
(SEQ ID NO:244)
b82) RNH-Val-Xaa₃-Leu-Ser-Arg-Thr-Val-Arg-Xaa₁-Thr-Xaa₂-Ile-Xaa₁-Ile-[linker]-
Leu-Asn-Pro-Glu-Ser-Lys-Ala-Ile-Lys-Asn-Leu-Leu-Lys-(OH)NH₂
(SEQ ID NO:245)
b83) RNH-Val-Pro-Xaa₃-Ser-Arg-Thr-Val-Arg-Xaa₁-Thr-Xaa₂-Ile-Xaa₄-Ile-[linker]-
Leu-Asn-Pro-Glu-Ser-Lys-Ala-Ile-Lys-Asn-Leu-Leu-Lys-(OH)NH₂
(SEQ ID NO:246)
b84) RNH-Val-Pro-Leu-Xaa₃-Arg-Thr-Val-Arg-Xaa₁-Thr-Xaa₂-Ile-Xaa₄-Ile-[linker]-
Leu-Asn-Pro-Glu-Ser-Lys-Ala-Ile-Lys-Asn-Leu-Leu-Lys-(OH)NH₂
(SEQ ID NO:247)
b85) RNH-Val-Pro-Leu-Ser-Xaa₃-Thr-Val-Arg-Xaa₁-Thr-Xaa₂-Ile-Xaa₄-Ile-[linker]-
Leu-Asn-Pro-Glu-Ser-Lys-Ala-Ile-Lys-Asn-Leu-Leu-Lys-(OH)NH₂
(SEQ ID NO:248)
b86) RNH-Val-Pro-Leu-Ser-Arg-Xaa₃-Val-Arg-Xaa₁-Thr-Xaa₂-Ile-Xaa₄-Ile-[linker]-
Leu-Asn-Pro-Glu-Ser-Lys-Ala-Ile-Lys-Asn-Leu-Leu-Lys-(OH)NH₂
(SEQ ID NO:249)
b87) RNH-Val-Pro-Leu-Ser-Arg-Thr-Xaa₃-Arg-Xaa₁-Thr-Xaa₂-Ile-Xaa₁-Ile-[linker]-
Leu-Asn-Pro-Glu-Ser-Lys-Ala-Ile-Lys-Asn-Leu-Leu-Lys-(OH)NH₂
(SEQ ID NO:250)
b88) RNH-Val-Pro-Leu-Ser-Arg-Thr-Val-Xaa₃-Xaa₁-Thr-Xaa₂-Ile-Xaa₄-Ile-[linker]-
Leu-Asn-Pro-Glu-Ser-Lys-Ala-Ile-Lys-Asn-Leu-Leu-Lys-(OH)NH₂
(SEQ ID NO:251)
b89) RNH-Val-Pro-Leu-Ser-Arg-Thr-Val-Arg-Cys-Thr-Cys-Ile-Ser-Xaa₄-[linker]-
Leu-Asn-Pro-Glu-Ser-Lys-Ala-Ile-Lys-Asn-Leu-Leu-Lys-(OH)NH₂
(SEQ ID NO:252)
b90) RNH-Xaa₃-Pro-Leu-Ser-Arg-Thr-Val-Arg-Xaa₁-Thr-Xaa₂-Ile-Ser-Xaa₄-[linker]-
Leu-Asn-Pro-Glu-Ser-Lys-Ala-Ile-Lys-Asn-Leu-Leu-Lys-(OH)NH₂
(SEQ ID NO:253)
b91) RNH-Val-Xaa₃-Leu-Ser-Arg-Thr-Val-Arg-Xaa₁-Thr-Xaa₂-Ile-Ser-Xaa₄-[linker]-
Leu-Asn-Pro-Glu-Ser-Lys-Ala-Ile-Lys-Asn-Leu-Leu-Lys-(OH)NH₂
(SEQ ID NO:254)
b92) RNH-Val-Pro-Xaa₃-Ser-Arg-Thr-Val-Arg-Xaa₁-Thr-Xaa₂-Ile-Ser-Xaa₄-[linker]-
Leu-Asn-Pro-Glu-Ser-Lys-Ala-IIe-Lys-Asn-Leu-Leu-Lys-(OH)NH₂
(SEQ ID NO:255)
b93) RNH-Val-Pro-Leu-Xaa₃-Arg-Thr-Val-Arg-Xaa₁-Thr-Xaa₂-Ile-Ser-Xaa₄-[linker]-
Leu-Asn-Pro-Glu-Ser-Lys-Ala-Ile-Lys-Asn-Leu-Leu-Lys-(OH)NH₂
(SEQ ID NO:256)
b94) RNH-Val-Pro-Leu-Ser-Xaa₃-Thr-Val-Arg-Xaa₁-Thr-Xaa₂-Ile-Ser-Xaa₄-[linker]-
Leu-Asn-Pro-Glu-Ser-Lys-Ala-Ile-Lys-Asn-Leu-Leu-Lys-(OH)NH₂
(SEQ ID NO:257)
b95) RNH-Val-Pro-Leu-Ser-Arg-Xaa₃-Val-Arg-Xaa₁-Thr-Xaa₂-Ile-Ser-Xaa₄-[linker]-
Leu-Asn-Pro-Glu-Ser-Lys-Ala-Ile-Lys-Asn-Leu-Leu-Lys-(OH)NH₂
(SEQ ID NO:258)
b96) RNH-Val-Pro-Leu-Ser-Arg-Thr-Xaa₃-Arg-Xaa₁-Thr-Xaa₂-Ile-Ser-Xaa₄-[linker]-
Leu-Asn-Pro-Glu-Ser-Lys-Ala-Ile-Lys-Asn-Leu-Leu-Lys-(OH)NH₂
(SEQ ID NO:259)
b97) RNH-Val-Pro-Leu-Ser-Arg-Thr-Val-Xaa₃-Xaa₁-Thr-Xaa₂-Ile-Ser-Xaa₄-[linker]-
Leu-Asn-Pro-Glu-Ser-Lys-Ala-Ile-Lys-Asn-Leu-Leu-Lys-(OH)NH₂
IP-10-(1-14)-[linker]-IP-10-(59-71)-acid or amide
(SEQ ID NO:260)
b98) RNH-Val-Pro-Leu-Ser-Arg-Thr-Val-Arg-Cys-Thr-Cys-Ile-Ser-Ile-[linker]-
Lys-Ala-Ile-Lys-Asn-Leu-Leu-Lys-Ala-Val-Ser-Lys-Glu-(OH)NH₂
(SEQ ID NO:261)
b99) RNH-Xaa₃-Pro-Leu-Ser-Arg-Thr-Val-Arg-Xaa₁-Thr-Xaa₂-Ile-Ser-Ile-[linker]-
Lys-Ala-Ile-Lys-Asn-Leu-Leu-Lys-Ala-Val-Ser-Lys-Glu-(OH)NH₂
(SEQ ID NO:262)
b100) RNH-Val-Xaa₃-Leu-Ser-Arg-Thr-Val-Arg-Xaa₁-Thr-Xaa₂-Ile-Ser-Ile-[linker]-
Lys-Ala-Ile-Lys-Asn-Leu-Leu-Lys-Ala-Val-Ser-Lys-Glu-(OH)NH₂
(SEQ ID NO:263)
b101) RNH-Val-Pro-Xaa₃-Ser-Arg-Thr-Val-Arg-Xaa₁-Thr-Xaa₂-Ile-Ser-Ile-[linker]-
Lys-Ala-Ile-Lys-Asn-Leu-Leu-Lys-Ala-Val-Ser-Lys-Glu-(OH)NH₂
(SEQ ID NO:264)
b102) RNH-Val-Pro-Leu-Xaa₃-Arg-Thr-Val-Arg-Xaa₁-Thr-Xaa₂-Ile-Ser-Ile-[linker]-
Lys-Ala-Ile-Lys-Asn-Leu-Leu-Lys-Ala-Val-Ser-Lys-Glu-(OH)NH₂
(SEQ ID NO:265)
b103) RNH-Val-Pro-Leu-Ser-Xaa₃-Thr-Val-Arg-Xaa₁-Thr-Xaa₂-Ile-Ser-Ile-[linker]-
Lys-Ala-Ile-Lys-Asn-Leu-Leu-Lys-Ala-Val-Ser-Lys-Glu-(OH)NH₂
(SEQ ID NO:266)
b104) RNH-Val-Pro-Leu-Ser-Arg-Xaa₃-Val-Arg-Xaa₁-Thr-Xaa₂-Ile-Ser-Ile-[linker]-
Lys-Ala-Ile-Lys-Asn-Leu-Leu-Lys-Ala-Val-Ser-Lys-Glu-(OH)NH₂
(SEQ ID NO:267)
b105) RNH-Val-Pro-Leu-Ser-Arg-Thr-Xaa₃-Arg-Xaa₁-Thr-Xaa₂-Ile-Ser-Ile-[linker]-
Lys-Ala-Ile-Lys-Asn-Leu-Leu-Lys-Ala-Val-Ser-Lys-Glu-(OH)NH₂
(SEQ ID NO:268)
b106) RNH-Val-Pro-Leu-Ser-Arg-Thr-Val-Xaa₃-Xaa₁-Thr-Xaa₂-Ile-Ser-Ile-[linker]-
Lys-Ala-Ile-Lys-Asn-Leu-Leu-Lys-Ala-Val-Ser-Lys-Glu-(OH)NH₂
(SEQ ID NO:269)
b107) RNH-Val-Pro-Leu-Ser-Arg-Thr-Val-Arg-Cys-Thr-Cys-Xaa₄-Ser-Ile-[linker]-
Lys-Ala-Ile-Lys-Asn-Leu-Leu-Lys-Ala-Val-Ser-Lys-Glu-(OH)NH₂
(SEQ ID NO:270)
b108) RNH-Xaa₃-Pro-Leu-Ser-Arg-Thr-Val-Arg-Xaa₁-Thr-Xaa₂-Xaa₄-Ser-Ile-[linker]-
Lys-Ala-Ile-Lys-Asn-Leu-Leu-Lys-Ala-Val-Ser-Lys-Glu-(OH)NH₂
(SEQ ID NO:271)
b109) RNH-Val-Xaa₃-Leu-Ser-Arg-Thr-Val-Arg-Xaa₁-Thr-Xaa₂-Xaa₄-Ser-Ile-[linker]-
Lys-Ala-Ile-Lys-Asn-Leu-Leu-Lys-Ala-Val-Ser-Lys-Glu-(OH)NH₂
(SEQ ID NO:272)
b110) RNH-Val-Pro-Xaa₃-Ser-Arg-Thr-Val-Arg-Xaa₁-Thr-Xaa₂-Xaa₄-Ser-Ile-[linker]-
Lys-Ala-Ile-Lys-Asn-Leu-Leu-Lys-Ala-Val-Ser-Lys-Glu-(OH)NH₂
(SEQ ID NO:273)
b111) RNH-Val-Pro-Leu-Xaa₃-Arg-hr-Val-Arg-Xaa₁-Thr-Xaa₂-Xaa₄-Ser-Ile-[linker]-
Lys-Ala-Ile-Lys-Asn-Leu-Leu-Lys-Ala-Val-Ser-Lys-Glu-(OH)NH₂
(SEQ ID NO:274)
b112) RNH-Val-Pro-Leu-Ser-Xaa₃-Thr-Val-Arg-Xaa₁-Thr-Xaa₂-Xaa₄-Ser-Ile-[linker]-
Lys-Ala-Ile-Lys-Asn-Leu-Leu-Lys-Ala-Val-Ser-Lys-Glu-(OH)NH₂
(SEQ ID NO:275)
b113) RNH-Val-Pro-Leu-Ser-Arg-Xaa₃-Val-Arg-Xaa₁-Thr-Xaa₂-Xaa₄-Ser-Ile-[linker]-
Lys-Ala-Ile-Lys-Asn-Leu-Leu-Lys-Ala-Val-Ser-Lys-Glu-(OH)NH₂
(SEQ ID NO:276)
b114) RNH-Val-Pro-Leu-Ser-Arg-Thr-Xaa₃-Arg-Xaa₁-Thr-Xaa₂-Xaa₄-Ser-Ile-[linker]-
Lys-Ala-Ile-Lys-Asn-Leu-Leu-Lys-Ala-Val-Ser-Lys-Glu-(OH)NH₂
(SEQ ID NO:277)
b115) RNH-Val-Pro-Leu-Ser-Arg-Thr-Val-Xaa₃-Xaa₁-Thr-Xaa₂-Xaa₄-Ser-Ile-[linker]-
Lys-Ala-Ile-Lys-Asn-Leu-Leu-Lys-Ala-Val-Ser-Lys-Glu-(OH)NH₂
(SEQ ID NO:278)
b116) RNH-Val-Pro-Leu-Ser-Arg-Thr-Val-Arg-Cys-Thr-Cys-Ile-Xaa₄-Ile-[linker]-
Lys-Ala-Ile-Lys-Asn-Leu-Leu-Lys-Ala-Val-Ser-Lys-Glu-(OH)NH₂
(SEQ ID NO:279)
b117) RNH-Xaa₃-Pro-Leu-Ser-Arg-Thr-Val-Arg-Xaa₁-Thr-Xaa₂-Ile-Xaa₄-Ile-[linker]-
Lys-Ala-Ile-Lys-Asn-Leu-Leu-Lys-Ala-Val-Ser-Lys-Glu-(OH)NH₂
(SEQ ID NO:280)
b118) RNH-Val-Xaa₃-Leu-Ser-Arg-Thr-Val-Arg-Xaa₁-Thr-Xaa₂-Ile-Xaa₄-Ile-[linker]-
Lys-Ala-Ile-Lys-Asn-Leu-Leu-Lys-Ala-Val-Ser-Lys-Glu-(OH)NH₂
(SEQ ID NO:281)
b119) RNH-Val-Pro-Xaa₃-Ser-Arg-Thr-Val-Arg-Xaa₁-Thr-Xaa₂-Ile-Xaa₄-Ile-[linker]-
Lys-Ala-Ile-Lys-Asn-Leu-Leu-Lys-Ala-Val-Ser-Lys-Glu-(OH)NH₂
(SEQ ID NO:282)
b120) RNH-Val-Pro-Leu-Xaa₃-Arg-Thr-Val-Arg-Xaa₁-Thr-Xaa₂-Ile-Xaa₄-Ile-[linker]-
Lys-Ala-Ile-Lys-Asn-Leu-Leu-Lys-Ala-Val-Ser-Lys-Glu-(OH)NH₂
(SEQ ID NO:283)
b121) RNH-Val-Pro-Leu-Ser-Xaa₃-Thr-Val-Arg-Xaa₁-Thr-Xaa₂-Ile-Xaa₄-Ile-[linker]-
Lys-Ala-Ile-Lys-Asn-Leu-Leu-Lys-Ala-Val-Ser-Lys-Glu-(OH)NH₂
(SEQ ID NO:284)
b122) RNH-Val-Pro-Leu-Ser-Arg-Xaa₃-Val-Arg-Xaa₁-Thr-Xaa₂-Ile-Xaa₄-Ile-[linker]-
Lys-Ala-Ile-Lys-Asn-Leu-Leu-Lys-Ala-Val-Ser-Lys-Glu-(OH)NH₂
(SEQ ID NO:285)
b123) RNH-Val-Pro-Leu-Ser-Arg-Thr-Xaa₃-Arg-Xaa₁-Thr-Xaa₂-Ile-Xaa₄-Ile-[linker]-
Lys-Ala-Ile-Lys-Asn-Leu-Leu-Lys-Ala-Val-Ser-Lys-Glu-(OH)NH₂
(SEQ ID NO:286)
b124) RNH-Val-Pro-Leu-Ser-Arg-Thr-Val-Xaa₃-Xaa₁-Thr-Xaa₂-Ile-Xaa₄-Ile-[linker]-
Lys-Ala-Ile-Lys-Asn-Leu-Leu-Lys-Ala-Val-Ser-Lys-Glu-(OH)NH₂
(SEQ ID NO:287)
b125) RNH-Val-Pro-Leu-Ser-Arg-Thr-Val-Arg-Cys-Thr-Cys-Ile-Ser-Xaa₄-[linker]-
Lys-Ala-Ile-Lys-Asn-Leu-Leu-Lys-Ala-Val-Ser-Lys-Glu-(OH)NH₂
(SEQ ID NO:288)
b126) RNH-Xaa₃-Pro-Leu-Ser-Arg-Thr-Val-Arg-Xaa₁-Thr-Xaa₂-Ile-Ser-Xaa₄-[linker]-
Lys-Ala-Ile-Lys-Asn-Leu-Leu-Lys-Ala-Val-Ser-Lys-Glu-(OH)NH₂
(SEQ ID NO:289)
b127) RNH-Val-Xaa₃-Leu-Ser-Arg-Thr-Val-Arg-Xaa₁-Thr-Xaa₂-Ile-Ser-Xaa₄-[linker]-
Lys-Ala-Ile-Lys-Asn-Leu-Leu-Lys-Ala-Val-Ser-Lys-Glu-(OH)NH₂
(SEQ ID NO:290)
b128) RNH-Val-Pro-Xaa₃-Ser-Arg-Thr-Val-Arg-Xaa₁-Thr-Xaa₂-Ile-Ser-Xaa₄-[linker]-
Lys-Ala-Ile-Lys-Asn-Leu-Leu-Lys-Ala-Val-Ser-Lys-Glu-(OH)NH₂
(SEQ ID NO:291)
b129) RNH-Val-Pro-Leu-Xaa₃-Arg-Thr-Val-Arg-Xaa₁-Thr-Xaa₂-Ile-Ser-Xaa₄-[linker]-
Lys-Ala-Ile-Lys-Asn-Leu-Leu-Lys-Ala-Val-Ser-Lys-Glu-(OH)NH₂
(SEQ ID NO:292)
b130) RNH-Val-Pro-Leu-Ser-Xaa₃-Thr-Val-Arg-Xaa₁-Thr-Xaa₂-Ile-Ser-Xaa₄-[linker]-
Lys-Ala-Ile-Lys-Asn-Leu-Leu-Lys-Ala-Val-Ser-Lys-Glu-(OH)NH₂
(SEQ ID NO:293)
b131) RNH-Val-Pro-Leu-Ser-Arg-Xaa₃-Val-Arg-Xaa₁-Thr-Xaa₂-Ile-Ser-Xaa₄-[linker]-
Lys-Ala-Ile-Lys-Asn-Leu-Leu-Lys-Ala-Val-Ser-Lys-Glu-(OH)NH₂
(SEQ ID NO:294)
b132) RNH-Val-Pro-Leu-Ser-Arg-Thr-Xaa₃-Arg-Xaa₁-Thr-Xaa₂-Ile-Ser-Xaa₄-[linker]-
Lys-Ala-Ile-Lys-Asn-Leu-Leu-Lys-Ala-Val-Ser-Lys-Glu-(OH)NH₂
(SEQ ID NO:295)
b133) RNH-Val-Pro-Leu-Ser-Arg-Thr-Val-Xaa₃-Xaa₁-Thr-Xaa₂-IIe-Ser-Xaa₄-[linker]-
Lys-Ala-Ile-Lys-Asn-Leu-Leu-Lys-Ala-Val-Ser-Lys-GIu-(OH)NH₂
IP-10-(1-17)-[linker]-IP-10-(65-77)-acid or amide
(SEQ ID NO:296)
b134) RNH-Val-Pro-Leu-Ser-Arg-Thr-Val-Arg-Cys-Thr-Cys-Ile-Ser-Ile-Ser-Asn-Gln-
[linker]-Leu-Lys-Ala-Val-Ser-Lys-Glu-Met-Ser-Lys-Arg-Ser-Pro-(OH)NH₂
(SEQ ID NO:297)
b135) RNH-Xaa₃-Pro-Leu-Ser-Arg-Thr-Val-Arg-Xaa₁-Thr-Xaa₂-Ile-Ser-Ile-Ser-Asn-
Gln-[linker]-Leu-Lys-Ala-Val-Ser-Lys-Glu-Met-Ser-Lys-Arg-Ser-Pro-(OH)NH₂
(SEQ ID NO:298)
b136) RNH-Val-Xaa₃-Leu-Ser-Arg-Thr-Val-Arg-Xaa₁-Thr-Xaa₂-Ile-Ser-Ile-Ser-Asn-
Gln-[linker]-Leu-Lys-Ala-Val-Ser-Lys-Glu-Met-Ser-Lys-Arg-Ser-Pro-(OH)NH₂
(SEQ ID NO:299)
b137) RNH-Val-Pro-Xaa₃-Ser-Arg-Thr-Val-Arg-Xaa₁-Thr-Xaa₂-Ile-Ser-Ile-Ser-Asn-
Gln-[linker]-Leu-Lys-Ala-Val-Ser-Lys-Glu-Met-Ser-Lys-Arg-Ser-Pro-(OH)NH₂
(SEQ ID NO:300)
b138) RNH-Val-Pro-Leu-Xaa₃-Arg-Thr-Val-Arg-Xaa₁-Thr-Xaa₂-Ile-Ser-Ile-Ser-Asn-
Gln-[linker]-Leu-Lys-Ala-Val-Ser-Lys-Glu-Met-Ser-Lys-Arg-Ser-Pro-(OH)NH₂
(SEQ ID NO:301)
b139) RNH-Val-Pro-Leu-Ser-Xaa₃-Thr-Val-Arg-Xaa₁-Thr-Xaa₂-Ile-Ser-Ile-Ser-Asn-
Gln-[linker]-Leu-Lys-Ala-Val-Ser-Lys-Glu-Met-Ser-Lys-Arg-Ser-Pro-(OH)NH₂
(SEQ ID NO:302)
b140) RNH-Val-Pro-Leu-Ser-Arg-Xaa₃-Val-Arg-Xaa₁-Thr-Xaa₂-Ile-Ser-Ile-Ser-Asn-
Gln-[linker]-Leu-Lys-Ala-Val-Ser-Lys-Glu-Met-Ser-Lys-Arg-Ser-Pro-(OH)NH₂
(SEQ ID NO:303)
b141) RNH-Val-Pro-Leu-Ser-Arg-Thr-Xaa₃-Arg-Xaa₁-Thr-Xaa₂-Ile-Ser-Ile-Ser-Asn-
Gln-[linker]-Leu-Lys-Ala-Val-Ser-Lys-Glu-Met-Ser-Lys-Arg-Ser-Pro-(OH)NH₂
(SEQ ID NO:304)
b142) RNH-Val-Pro-Leu-Ser-Arg-Thr-Val-Xaa₃-Xaa₁-Thr-Xaa₂-Ile-Ser-Ile-Ser-Asn-
Gln-[linker]-Leu-Lys-Ala-Val-Ser-Lys-Glu-Met-Ser-Lys-Arg-Ser-Pro-(OH)NH₂
(SEQ ID NO:305)
b143) RNH-Val-Pro-Leu-Ser-Arg-Thr-Val-Arg-Cys-Thr-Cys-Xaa₄-Ser-Ile-Ser-Asn-
Gln-[linker]-Leu-Lys-Ala-Val-Ser-Lys-Glu-Met-Ser-Lys-Arg-Ser-Pro-(OH)NH₂
(SEQ ID NO:306)
b144) RNH-Xaa₃-Pro-Leu-Ser-Arg-Thr-Val-Arg-Xaa₁-Thr-Xaa₂-Xaa₄-Ser-Ile-Ser-Asn-
Gln-[linker]-Leu-Lys-Ala-Val-Ser-Lys-Glu-Met-Ser-Lys-Arg-Ser-Pro-(OH)NH₂
(SEQ ID NO:307)
b145) RNH-Val-Xaa₃-Leu-Ser-Arg-Thr-Val-Arg-Xaa₁-Thr-Xaa₂-Xaa₁-Ser-Ile-Ser-Asn-
Gln-[linker]-Leu-Lys-Ala-Val-Ser-Lys-Glu-Met-Ser-Lys-Arg-Ser-Pro-(OH)NH₂
(SEQ ID NO:308)
b146) RNH-Val-Pro-Xaa₃-Ser-Arg-Thr-Val-Arg-Xaa₁-Thr-Xaa₂-Xaa₄-Ser-Ile-Ser-Asn-
Gln-[linker]-Leu-Lys-Ala-Val-Ser-Lys-Glu-Met-Ser-Lys-Arg-Ser-Pro-(OH)NH₂
(SEQ ID NO:309)
b147) RNH-Val-Pro-Leu-Xaa₃-Arg-Thr-Val-Arg-Xaa₁-Thr-Xaa₂-Xaa₄-Ser-Ile-Ser-Asn-
Gln-[linker]-Leu-Lys-Ala-Val-Ser-Lys-Glu-Met-Ser-Lys-Arg-Ser-Pro-(OH)NH₂
(SEQ ID NO:310)
b148) RNH-Val-Pro-Leu-Ser-Xaa₃-Thr-Val-Arg-Xaa₁-Thr-Xaa₂-Xaa₄-Ser-Ile-Ser-Asn-
Gln-[linker]-Leu-Lys-Ala-Val-Ser-Lys-Glu-Met-Ser-Lys-Arg-Ser-Pro-(OH)NH₂
(SEQ ID NO:311)
b149) RNH-Val-Pro-Leu-Ser-Arg-Xaa₃-Val-Arg-Xaa₁-Thr-Xaa₂-Xaa₄-Ser-Ile-Ser-Asn-
Gln-[linker]-Leu-Lys-Ala-Val-Ser-Lys-Glu-Met-Ser-Lys-Arg-Ser-Pro-(OH)NH₂
(SEQ ID NO:312)
b150) RNH-Val-Pro-Leu-Ser-Arg-Thr-Xaa₃-Arg-Xaa₁-Thr-Xaa₂-Xaa₄-Ser-Ile-Ser-Asn-
Gln-[linker]-Leu-Lys-Ala-Val-Ser-Lys-Glu-Met-Ser-Lys-Arg-Ser-Pro-(OH)NH₂
(SEQ ID NO:313)
b151) RNH-Val-Pro-Leu-Ser-Arg-Thr-Val-Xaa₃-Xaa₁-Thr-Xaa₂-Xaa₄-Ser-Ile-Ser-Asn-
Gln-[linker]-Leu-Lys-Ala-Val-Ser-Lys-Glu-Met-Ser-Lys-Arg-Ser-Pro-(OH)NH₂
(SEQ ID NO:314)
b152) RNH-Val-Pro-Leu-Ser-Arg-Thr-Val-Arg-Cys-Thr-Cys-Ile-Xaa₄-Ile-Ser-Asn-
Gln-[linker]-Leu-Lys-Ala-Val-Ser-Lys-Glu-Met-Ser-Lys-Arg-Ser-Pro-(OH)NH₂
(SEQ ID NO:315)
b153) RNH-Xaa₃-Pro-Leu-Ser-Arg-Thr-Val-Arg-Xaa₁-Thr-Xaa₂-Ile-Xaa₄-Ile-Ser-Asn-
Gln-[linker]-Leu-Lys-Ala-Val-Ser-Lys-Glu-Met-Ser-Lys-Arg-Ser-Pro-(OH)NH₂
(SEQ ID NO:316)
b154) RNH-Val-Xaa₃-Leu-Ser-Arg-Thr-Val-Arg-Xaa₁-Thr-Xaa₂-Ile-Xaa₄-Ile-Ser-Asn-
Gln-[linker]-Leu-Lys-Ala-Val-Ser-Lys-Glu-Met-Ser-Lys-Arg-Ser-Pro-(OH)NH₂
(SEQ ID NO:317)
b155) RNH-Val-Pro-Xaa₃-Ser-Arg-Thr-Val-Arg-Xaa₁-Thr-Xaa₂-Ile-Xaa₄-Ile-Ser-Asn-
Gln-[linker]-Leu-Lys-Ala-Val-Ser-Lys-Glu-Met-Ser-Lys-Arg-Ser-Pro-(OH)NH₂
(SEQ ID NO:318)
b156) RNH-Val-Pro-Leu-Xaa₃-Arg-Thr-Val-Arg-Xaa₁-Thr-Xaa₂-Ile-Xaa₄-Ile-Ser-Asn-
Gln-[linker]-Leu-Lys-Ala-Val-Ser-Lys-Glu-Met-Ser-Lys-Arg-Ser-Pro-(OH)NH₂
(SEQ ID NO:319)
b157) RNH-Val-Pro-Leu-Ser-Xaa₃-Thr-Val-Arg-Xaa₁-Thr-Xaa₂-Ile-Xaa₄-Ile-Ser-Asn-
Gln-[linker]-Leu-Lys-Ala-Val-Ser-Lys-Glu-Met-Ser-Lys-Arg-Ser-Pro-(OH)NH₂
(SEQ ID NO:320)
b158) RNH-Val-Pro-Leu-Ser-Arg-Xaa₃-Val-Arg-Xaa₁-Thr-Xaa₂-Ile-Xaa₄-Ile-Ser-Asn-
Gln-[linker]-Leu-Lys-Ala-Val-Ser-Lys-Glu-Met-Ser-Lys-Arg-Ser-Pro-(OH)NH₂
(SEQ ID NO:321)
b159) RNH-Val-Pro-Leu-Ser-Arg-Thr-Xaa₃-Arg-Xaa₁-Thr-Xaa₂-Ile-Xaa₄-Ile-Ser-Asn-
Gln-[linker]-Leu-Lys-Ala-Val-Ser-Lys-Glu-Met-Ser-Lys-Arg-Ser-Pro-(OH)NH₂
(SEQ ID NO:322)
b160) RNH-Val-Pro-Leu-Ser-Arg-Thr-Val-Xaa₃-Xaa₁-Thr-Xaa₂-Ile-Xaa₄-Ile-Ser-Asn-
Gln-[linker]-Leu-Lys-Ala-Val-Ser-Lys-Glu-Met-Ser-Lys-Arg-Ser-Pro-(OH)NH₂
(SEQ ID NO:323)
b161) RNH-Val-Pro-Leu-Ser-Arg-Thr-Val-Arg-Cys-Thr-Cys-Ile-Ser-Xaa₄-Ser-Asn-
Gln-[linker]-Leu-Lys-Ala-Val-Ser-Lys-Glu-Met-Ser-Lys-Arg-Ser-Pro-(OH)NH₂
(SEQ ID NO:324)
b162) RNH-Xaa₃-Pro-Leu-Ser-Arg-Thr-Val-Arg-Xaa₁-Thr-Xaa₂-Ile-Ser-Xaa₄-Ser-Asn-
Gln-[linker]-Leu-Lys-Ala-Val-Ser-Lys-Glu-Met-Ser-Lys-Arg-Ser-Pro-(OH)NH₂
(SEQ ID NO:325)
b163) RNH-Val-Xaa₃-Leu-Ser-Arg-Thr-Val-Arg-Xaa₁-Thr-Xaa₂-Ile-Ser-Xaa₄-Ser-Asn-
Gln-[linker]-Leu-Lys-Ala-Val-Ser-Lys-Glu-Met-Ser-Lys-Arg-Ser-Pro-(OH)NH₂
(SEQ ID NO:326)
b164) RNH-Val-Pro-Xaa₃-Ser-Arg-Thr-Val-Arg-Xaa₁-Thr-Xaa₂-Ile-Ser-Xaa₄-Ser-Asn-
Gln-[linker]-Leu-Lys-Ala-Val-Ser-Lys-Glu-Met-Ser-Lys-Arg-Ser-Pro-(OH)NH₂
(SEQ ID NO:327)
b165) RNH-Val-Pro-Leu-Xaa₃-Arg-Thr-Val-Arg-Xaa₁-Thr-Xaa₂-Ile-Ser-Xaa₄-Ser-Asn-
Gln-[linker]-Leu-Lys-Ala-Val-Ser-Lys-Glu-Met-Ser-Lys-Arg-Ser-Pro-(OH)NH₂
(SEQ ID NO:328)
b166) RNH-Val-Pro-Leu-Ser-Xaa₃-Thr-Val-Arg-Xaa₁-Thr-Xaa₂-Ile-Ser-Xaa₄-Ser-Asn-
Gln-[linker]-Leu-Lys-Ala-Val-Ser-Lys-Glu-Met-Ser-Lys-Arg-Ser-Pro-(OH)NH₂
(SEQ ID NO:329)
b167) RNH-Val-Pro-Leu-Ser-Arg-Xaa₃-Val-Arg-Xaa₁-Thr-Xaa₂-Ile-Ser-Xaa₄-Ser-Asn-
Gln-[linker]-Leu-Lys-Ala-Val-Ser-Lys-Glu-Met-Ser-Lys-Arg-Ser-Pro-(OH)NH₂
(SEQ ID NO:330)
b168) RNH-Val-Pro-Leu-Ser-Arg-Thr-Xaa₃-Arg-Xaa₁-Thr-Xaa₂-Ile-Ser-Xaa₄-Ser-Asn-
Gln-[linker]-Leu-Lys-Ala-Val-Ser-Lys-Glu-Met-Ser-Lys-Arg-Ser-Pro-(OH)NH₂
(SEQ ID NO:331)
b169) RNH-Val-Pro-Leu-Ser-Arg-Thr-Val-Xaa₃-Xaa₁-Thr-Xaa₂-Ile-Ser-Xaa₄-Ser-Asn-
Gln-[linker]-Leu-Lys-Ala-Val-Ser-Lys-Glu-Met-Ser-Lys-Arg-Ser-Pro-(OH)NH₂
(SEQ ID NO:332)
b170) RNH-Val-Pro-Leu-Ser-Arg-Thr-Val-Arg-Cys-Thr-Cys-Ile-Ser-Ile-Ser-Xaa₄-Gln-
[linker]-Leu-Lys-Ala-Val-Ser-Lys-Glu-Met-Ser-Lys-Arg-Ser-Pro-(OH)NH₂
(SEQ ID NO:333)
b171) RNH-Xaa₃-Pro-Leu-Ser-Arg-Thr-Val-Arg-Xaa₁-Thr-Xaa₂-Ile-Ser-Ile-Ser-Xaa₄-
Gln-[linker]-Leu-Lys-Ala-Val-Ser-Lys-Glu-Met-Ser-Lys-Arg-Ser-Pro-(OH)NH₂
(SEQ ID NO:334)
b172) RNH-Val-Xaa₃-Leu-Ser-Arg-Thr-Val-Arg-Xaa₁-Thr-Xaa₂-Ile-Ser-Ile-Ser-Xaa₄-
Gln-[linker]-Leu-Lys-Ala-Val-Ser-Lys-Glu-Met-Ser-Lys-Arg-Ser-Pro-(OH)NH₂
(SEQ ID NO:335)
b173) RNH-Val-Pro-Xaa₃-Ser-Arg-Thr-Val-Arg-Xaa₁-Thr-Xaa₂-Ile-Ser-Ile-Ser-Xaa₄-
Gln-[linker]-Leu-Lys-Ala-Val-Ser-Lys-Glu-Met-Ser-Lys-Arg-Ser-Pro-(OH)NH₂
(SEQ ID NO:336)
b174) RNH-Val-Pro-Leu-Xaa₃-Arg-Thr-Val-Arg-Xaa₁-Thr-Xaa₂-Ile-Ser-Ile-Ser-Xaa₄-
Gln-[linker]-Leu-Lys-Ala-Val-Ser-Lys-Glu-Met-Ser-Lys-Arg-Ser-Pro-(OH)NH₂
(SEQ ID NO:337)
b175) RNH-Val-Pro-Leu-Ser-Xaa₃-Thr-Val-Arg-Xaa₁-Thr-Xaa₂-Ile-Ser-Ile-Ser-Xaa₄-
Gln-[linker]-Leu-Lys-Ala-Val-Ser-Lys-Glu-Met-Ser-Lys-Arg-Ser-Pro-(OH)NH₂
(SEQ ID NO:338)
b176) RNH-Val-Pro-Leu-Ser-Arg-Xaa₃-Val-Arg-Xaa₁-Thr-Xaa₂-Ile-Ser-Ile-Ser-Xaa₄-
Gln-[linker]-Leu-Lys-Ala-Val-Ser-Lys-Glu-Met-Ser-Lys-Arg-Ser-Pro-(OH)NH₂
(SEQ ID NO:339)
b177) RNH-Val-Pro-Leu-Ser-Arg-Thr-Xaa₃-Arg-Xaa₁-Thr-Xaa₂-Ile-Ser-Ile-Ser-Xaa₄-
Gln-[linker]-Leu-Lys-Ala-Val-Ser-Lys-Glu-Met-Ser-Lys-Arg-Ser-Pro-(OH)NH₂
(SEQ ID NO:340)
b178) RNH-Val-Pro-Leu-Ser-Arg-Thr-Val-Xaa₃-Xaa₁-Thr-Xaa₂-Ile-Ser-Ile-Ser-Xaa₄-
Gln-[linker]-Leu-Lys-Ala-Val-Ser-Lys-Glu-Met-Ser-Lys-Arg-Ser-Pro-(OH)NH₂
(SEQ ID NO:341)
b179) RNH-Val-Pro-Leu-Ser-Arg-Thr-Val-Arg-Cys-Thr-Cys-Ile-Ser-Ile-Ser-Gln-Xaa₄-
[linker]-Leu-Lys-Ala-Val-Ser-Lys-Glu-Met-Ser-Lys-Arg-Ser-Pro-(OH)NH₂
(SEQ ID NO:342)
b180) RNH-Xaa₃-Pro-Leu-Ser-Arg-Thr-Val-Arg-Xaa₁-Thr-Xaa₂-Ile-Ser-Ile-Ser-Gln-
Xaa₄-[linker]-Leu-Lys-Ala-Val-Ser-Lys-Glu-Met-Ser-Lys-Arg-Ser-Pro-(OH)NH₂
(SEQ ID NO:343)
b181) RNH-Val-Xaa₃-Leu-Ser-Arg-Thr-Val-Arg-Xaa₁-Thr-Xaa₂-Ile-Ser-Ile-Ser-Gln-
Xaa₄-[linker]-Leu-Lys-Ala-Val-Ser-Lys-Glu-Met-Ser-Lys-Arg-Ser-Pro-(OH)NH₂
(SEQ ID NO:344)
b182) RNH-Val-Pro-Xaa₃-Ser-Arg-Thr-Val-Arg-Xaa₁-Thr-Xaa₂-Ile-Ser-Ile-Ser-Gln-
Xaa₄-[linker]-Leu-Lys-Ala-Val-Ser-Lys-Glu-Met-Ser-Lys-Arg-Ser-Pro-(OH)NH₂
(SEQ ID NO:345)
b183) RNH-Val-Pro-Leu-Xaa₃-Arg-Thr-Val-Arg-Xaa₁-Thr-Xaa₂-Ile-Ser-Ile-Ser-Gln-
Xaa₄-[linker]-Leu-Lys-Ala-Val-Ser-Lys-Glu-Met-Ser-Lys-Arg-Ser-Pro-(OH)NH₂
(SEQ ID NO:346)
b184) RNH-Val-Pro-Leu-Ser-Xaa₃-Thr-Val-Arg-Xaa₁-Thr-Xaa2-Ile-Ser-Ile-Ser-Gln-
Xaa₄-[linker]-Leu-Lys-Ala-Val-Ser-Lys-Glu-Met-Ser-Lys-Arg-Ser-Pro-(OH)NH₂
(SEQ ID NO:347)
b185) RNH-Val-Pro-Leu-Ser-Arg-Xaa₃-Val-Arg-Xaa₁-Thr-Xaa₂-Ile-Ser-Ile-Ser-Gln-
Xaa₄-[linker]-Leu-Lys-Ala-Val-Ser-Lys-Glu-Met-Ser-Lys-Arg-Ser-Pro-(OH)NH₂
(SEQ ID NO:348)
b186) RNH-Val-Pro-Leu-Ser-Arg-Thr-Xaa₃-Arg-Xaa₁-Thr-Xaa₂-Ile-Ser-Ile-Ser-Gln-
Xaa₄-[linker]-Leu-Lys-Ala-Val-Ser-Lys-Glu-Met-Ser-Lys-Arg-Ser-Pro-(OH)NH₂
(SEQ ID NO:349)
b187) RNH-Val-Pro-Leu-Ser-Arg-Thr-Val-Xaa₃-Xaa₁-Thr-Xaa₂-Ile-Ser-Ile-Ser-Gln-
Xaa₄-[linker]-Leu-Lys-Ala-Val-Ser-Lys-Glu-Met-Ser-Lys-Arg-Ser-Pro-(OH)NH₂
IP-10-(1-17)-[linker]-IP-10-(54-66)-acid or amide
(SEQ ID NO:350)
b188) RNH-Val-Pro-Leu-Ser-Arg-Thr-Val-Arg-Cys-Thr-Cys-Ile-Ser-Ile-Ser-Asn-Gln-
[linker]-Leu-Asn-Pro-Glu-Ser-Lys-Ala-Ile-Lys-Asn-Leu-Leu-Lys-(OH)NH₂
(SEQ ID NO:351)
b189) RNH-Xaa₃-Pro-Leu-Ser-Arg-Thr-Val-Arg-Xaa₁-Thr-Xaa₂-Ile-Ser-Ile-Ser-Asn-
Gln-[linker]-Leu-Asn-Pro-Glu-Ser-Lys-Ala-Ile-Lys-Asn-Leu-Leu-Lys-(OH)NH₂
(SEQ ID NO:352)
b190) RNH-Val-Xaa₃-Leu-Ser-Arg-Thr-Val-Arg-Xaa₁-Thr-Xaa₂-Ile-Ser-Ile-Ser-Asn-
Gln-[linker]-Leu-Asn-Pro-Glu-Ser-Lys-Ala-Ile-Lys-Asn-Leu-Leu-Lys-(OH)NH₂
(SEQ ID NO:353)
b191) RNH-Val-Pro-Xaa₃-Ser-Arg-Thr-Val-Arg-Xaa₁-Thr-Xaa₂-Ile-Ser-Ile-Ser-Asn-
Gln-[linker]-Leu-Asn-Pro-Glu-Ser-Lys-Ala-Ile-Lys-Asn-Leu-Leu-Lys-(OH)NH₂
(SEQ ID NO:354)
b192) RNH-Val-Pro-Leu-Xaa₃-Arg-Thr-Val-Arg-Xaa₁-Thr-Xaa₂-Ile-Ser-Ile-Ser-Asn-
Gln-[linker]-Leu-Asn-Pro-Glu-Ser-Lys-Ala-Ile-Lys-Asn-Leu-Leu-Lys-(OH)NH₂
(SEQ ID NO:355)
b193) RNH-Val-Pro-Leu-Ser-Xaa₃-Thr-Val-Arg-Xaa₁-Thr-Xaa₂-Ile-Ser-Ile-Ser-Asn-
Gln-[linker]-Leu-Asn-Pro-Glu-Ser-Lys-Ala-Ile-Lys-Asn-Leu-Leu-Lys-(OH)NH₂
(SEQ ID NO:356)
b194) RNH-Val-Pro-Leu-Ser-Arg-Xaa₃-Val-Arg-Xaa₁-Thr-Xaa₂-Ile-Ser-Ile-Ser-Asn-
Gln-[linker]-Leu-Asn-Pro-Glu-Ser-Lys-Ala-Ile-Lys-Asn-Leu-Leu-Lys-(OH)NH₂
(SEQ ID NO:357)
b195) RNH-Val-Pro-Leu-Ser-Arg-Thr-Xaa₃-Arg-Xaa₁-Thr-Xaa₂-Ile-Ser-Ile-Ser-Asn-
Gln-[linker]-Leu-Asn-Pro-Glu-Ser-Lys-Ala-Ile-Lys-Asn-Leu-Leu-Lys-(OH)NH₂
(SEQ ID NO:358)
b196) RNH-Val-Pro-Leu-Ser-Arg-Thr-Val-Xaa₃-Xaa₁-Thr-Xaa₂-Ile-Ser-Ile-Ser-Asn-
Gln-[linker]-Leu-Asn-Pro-Glu-Ser-Lys-Ala-Ile-Lys-Asn-Leu-Leu-Lys-(OH)NH₂
(SEQ ID NO:359)
b197) RNH-Val-Pro-Leu-Ser-Arg-Thr-Val-Arg-Cys-Thr-Cys-Xaa₄-Ser-Ile-Ser-Asn-
Gln-[linker]-Leu-Asn-Pro-Glu-Ser-Lys-Ala-Ile-Lys-Asn-Leu-Leu-Lys-(OH)NH₂
(SEQ ID NO:360)
b198) RNH-Xaa₃-Pro-Leu-Ser-Arg-Thr-Val-Arg-Xaa₁-Thr-Xaa₂-Xaa₄-Ser-Ile-Ser-Asn-
Gln-[linker]-Leu-Asn-Pro-Glu-Ser-Lys-Ala-Ile-Lys-Asn-Leu-Leu-Lys-(OH)NH₂
(SEQ ID NO:361)
b199) RNH-Val-Xaa₃-Leu-Ser-Arg-Thr-Val-Arg-Xaa₁-Thr-Xaa₂-Xaa₄-Ser-Ile-Ser-Asn-
Gln-[linker]-Leu-Asn-Pro-Glu-Ser-Lys-Ala-Ile-Lys-Asn-Leu-Leu-Lys-(OH)NH₂
(SEQ ID NO:362)
b200) RNH-Val-Pro-Xaa₃-Ser-Arg-Thr-Val-Arg-Xaa₁-Thr-Xaa₂-Xaa₄-Ser-Ile-Ser-Asn-
Gln-[linker]-Leu-Asn-Pro-Glu-Ser-Lys-Ala-Ile-Lys-Asn-Leu-Leu-Lys-(OH)NH₂
(SEQ ID NO:363)
b201) RNH-Val-Pro-Leu-Xaa₃-Arg-Thr-Val-Arg-Xaa₁-Thr-Xaa₂-Xaa₄-Ser-Ile-Ser-Asn-
Gln-[linker]-Leu-Asn-Pro-Glu-Ser-Lys-Ala-Ile-Lys-Asn-Leu-Leu-Lys-(OH)NH₂
(SEQ ID NO:364)
b202) RNH-Val-Pro-Leu-Ser-Xaa₃-Thr-Val-Arg-Xaa₁-Thr-Xaa₂-Xaa₄-Ser-Ile-Ser-Asn-
Gln-[linker]-Leu-Asn-Pro-Glu-Ser-Lys-Ala-Ile-Lys-Asn-Leu-Leu-Lys-(OH)NH₂
(SEQ ID NO:365)
b203) RNH-Val-Pro-Leu-Ser-Arg-Xaa₃-Val-Arg-Xaa₁-Thr-Xaa₂-Xaa₁-Ser-Ile-Ser-Asn-
Gln-[linker]-Leu-Asn-Pro-Glu-Ser-Lys-Ala-Ile-Lys-Asn-Leu-Leu-Lys-(OH)NH₂
(SEQ ID NO:366)
b204) RNH-Val-Pro-Leu-Ser-Arg-Thr-Xaa₃-Arg-Xaa₁-Thr-Xaa₂-Xaa₄-Ser-Ile-Ser-Asn-
Gln-[linker]-Leu-Asn-Pro-Glu-Ser-Lys-Ala-Ile-Lys-Asn-Leu-Leu-Lys-(OH)NH₂
(SEQ ID NO:367)
b205) RNH-Val-Pro-Leu-Ser-Arg-Thr-Val-Xaa₃-Xaa₁-Thr-Xaa₂-Xaa₄-Ser-Ile-Ser-Asn-
Gln-[linker]-Leu-Asn-Pro-Glu-Ser-Lys-Ala-Ile-Lys-Asn-Leu-Leu-Lys-(OH)NH₂
(SEQ ID NO:368)
b206) RNH-Val-Pro-Leu-Ser-Arg-Thr-Val-Arg-Cys-Thr-Cys-Ile-Xaa₄-Ile-Ser-Asn-
Gln-[linker]-Leu-Asn-Pro-Glu-Ser-Lys-Ala-Ile-Lys-Asn-Leu-Leu-Lys-(OH)NH₂
(SEQ ID NO:369)
b207) RNH-Xaa₃-Pro-Leu-Ser-Arg-Thr-Val-Arg-Xaa₁-Thr-Xaa₂-Ile-Xaa₄-Ile-Ser-Asn-
Gln-[linker]-Leu-Asn-Pro-Glu-Ser-Lys-Ala-Ile-Lys-Asn-Leu-Leu-Lys-(OH)NH₂
(SEQ ID NO:370)
b208) RNH-Val-Xaa₃-Leu-Ser-Arg-Thr-Val-Arg-Xaa₁-Thr-Xaa₂-Ile-Xaa₄-Ile-Ser-Asn-
Gln-[linker]-Leu-Asn-Pro-Glu-Ser-Lys-Ala-Ile-Lys-Asn-Leu-Leu-Lys-(OH)NH₂
(SEQ ID NO:371)
b209) RNH-Val-Pro-Xaa₃-Ser-Arg-Thr-Val-Arg-Xaa₁-Thr-Xaa₂-Ile-Xaa₄-Ile-Ser-Asn-
Gln-[linker]-Leu-Asn-Pro-Glu-Ser-Lys-Ala-Ile-Lys-Asn-Leu-Leu-Lys-(OH)NH₂
(SEQ ID NO:372)
b210) RNH-Val-Pro-Leu-Xaa₃-Arg-Thr-Val-Arg-Xaa₁-Thr-Xaa₂-Ile-Xaa₄-Ile-Ser-Asn-
Gln-[linker]-Leu-Asn-Pro-Glu-Ser-Lys-Ala-Ile-Lys-Asn-Leu-Leu-Lys-(OH)NH₂
(SEQ ID NO:373)
b211) RNH-Val-Pro-Leu-Ser-Xaa₃-Thr-Val-Arg-Xaa₁-Thr-Xaa₂-Ile-Xaa₄-Ile-Ser-Asn-
Gln-[linker]-Leu-Asn-Pro-Glu-Ser-Lys-Ala-Ile-Lys-Asn-Leu-Leu-Lys-(OH)NH₂
(SEQ ID NO:374)
b212) RNH-Val-Pro-Leu-Ser-Arg-Xaa₃-Val-Arg-Xaa₁-Thr-Xaa₂-Ile-Xaa₄-Ile-Ser-Asn-
Gln-[linker]-Leu-Asn-Pro-Glu-Ser-Lys-Ala-Ile-Lys-Asn-Leu-Leu-Lys-(OH)NH₂
(SEQ ID NO:375)
b213) RNH-Val-Pro-Leu-Ser-Arg-Thr-Xaa₃-Arg-Xaa₁-Thr-Xaa₂-Ile-Xaa₄-Ile-Ser-Asn-
Gln-[linker]-Leu-Asn-Pro-Glu-Ser-Lys-Ala-Ile-Lys-Asn-Leu-Leu-Lys-(OH)NH₂
(SEQ ID NO:376)
b214) RNH-Val-Pro-Leu-Ser-Arg-Thr-Val-Xaa₃-Xaa₁-Thr-Xaa₂-Ile-Xaa₄-Ile-Ser-Asn-
Gln-[linker]-Leu-Asn-Pro-Glu-Ser-Lys-Ala-Ile-Lys-Asn-Leu-Leu-Lys-(OH)NH₂
(SEQ ID NO:377)
b215) RNH-Val-Pro-Leu-Ser-Arg-Thr-Val-Arg-Cys-Thr-Cys-Ile-Ser-Xaa₄-Ser-Asn-
Gln-[linker]-Leu-Asn-Pro-Glu-Ser-Lys-Ala-Ile-Lys-Asn-Leu-Leu-Lys-(OH)NH₂
(SEQ ID NO:378)
b216) RNH-Xaa₃-Pro-Leu-Ser-Arg-Thr-Val-Arg-Xaa₁-Thr-Xaa₂-Ile-Ser-Xaa₄-Ser-Asn-
Gln-[linker]-Leu-Asn-Pro-Glu-Ser-Lys-Ala-Ile-Lys-Asn-Leu-Leu-Lys-(OH)NH₂
(SEQ ID NO:379)
b217) RNH-Val-Xaa₃-Leu-Ser-Arg-Thr-Val-Arg-Xaa₁-Thr-Xaa₂-Ile-Ser-Xaa₄-Ser-Asn-
Gln-[linker]-Leu-Asn-Pro-Glu-Ser-Lys-Ala-Ile-Lys-Asn-Leu-Leu-Lys-(OH)NH₂
(SEQ ID NO:380)
b218) RNH-Val-Pro-Xaa₃-Ser-Arg-Thr-Val-Arg-Xaa₁-Thr-Xaa₂-Ile-Ser-Xaa₄-Ser-Asn-
Gln-[linker]-Leu-Asn-Pro-Glu-Ser-Lys-Ala-Ile-Lys-Asn-Leu-Leu-Lys-(OH)NH₂
(SEQ ID NO:381)
b219) RNH-Val-Pro-Leu-Xaa₃-Arg-Thr-Val-Arg-Xaa₁-Thr-Xaa₂-Ile-Ser-Xaa₄-Ser-Asn-
Gln-[linker]-Leu-Asn-Pro-Glu-Ser-Lys-Ala-Ile-Lys-Asn-Leu-Leu-Lys-(OH)NH₂
(SEQ ID NO:382)
b220) RNH-Val-Pro-Leu-Ser-Xaa₃-Thr-Val-Arg-Xaa₁-Thr-Xaa₂-Ile-Ser-Xaa₄-Ser-Asn-
Gln-[linker]-Leu-Asn-Pro-Glu-Ser-Lys-Ala-Ile-Lys-Asn-Leu-Leu-Lys-(OH)NH₂
(SEQ ID NO:383)
b221) RNH-Val-Pro-Leu-Ser-Arg-Xaa₃-Val-Arg-Xaa₁-Thr-Xaa₂-Ile-Ser-Xaa₄-Ser-Asn-
Gln-[linker]-Leu-Asn-Pro-Glu-Ser-Lys-Ala-Ile-Lys-Asn-Leu-Leu-Lys-(OH)NH₂
(SEQ ID NO:384)
b222) RNH-Val-Pro-Leu-Ser-Arg-Thr-Xaa₃-Arg-Xaa₁-Thr-Xaa₂-Ile-Ser-Xaa₄-Ser-Asn-
Gln-[linker]-Leu-Asn-Pro-Glu-Ser-Lys-Ala-Ile-Lys-Asn-Leu-Leu-Lys-(OH)NH₂
(SEQ ID NO:385)
b223) RNH-Val-Pro-Leu-Ser-Arg-Thr-Val-Xaa₃-Xaa₁-Thr-Xaa₂-Ile-Ser-Xaa₄-Ser-Asn-
Gln-[linker]-Leu-Asn-Pro-Glu-Ser-Lys-Ala-Ile-Lys-Asn-Leu-Leu-Lys-(OH)NH₂
(SEQ ID NO:386)
b224) RNH-Val-Pro-Leu-Ser-Arg-Thr-Val-Arg-Cys-Thr-Cys-Ile-Ser-Ile-Ser-Xaa₄-Gln-
[linker]-Leu-Asn-Pro-Glu-Ser-Lys-Ala-Ile-Lys-Asn-Leu-Leu-Lys-(OH)NH₂
(SEQ ID NO:387)
b225) RNH-Xaa₃-Pro-Leu-Ser-Arg-Thr-Val-Arg-Xaa₁-Thr-Xaa₂-Ile-Ser-Ile-Ser-Xaa₄-
Gln-[linker]-Leu-Asn-Pro-Glu-Ser-Lys-Ala-Ile-Lys-Asn-Leu-Leu-Lys-(OH)NH₂
(SEQ ID NO:388)
b226) RNH-Val-Xaa₃-Leu-Ser-Arg-Thr-Val-Arg-Xaa₁-Thr-Xaa₂-Ile-Ser-Ile-Ser-Xaa₄-
Gln-[linker]-Leu-Asn-Pro-Glu-Ser-Lys-Ala-Ile-Lys-Asn-Leu-Leu-Lys-(OH)NH₂
(SEQ ID NO:389)
b227) RNH-Val-Pro-Xaa₃-Ser-Arg-Thr-Val-Arg-Xaa₁-Thr-Xaa₂-Ile-Ser-Ile-Ser-Xaa₄-
Gln-[linker]-Leu-Asn-Pro-Glu-Ser-Lys-Ala-Ile-Lys-Asn-Leu-Leu-Lys-(OH)NH₂
(SEQ ID NO:390)
b228) RNH-Val-Pro-Leu-Xaa₃-Arg-Thr-Val-Arg-Xaa₁-Thr-Xaa₂-Ile-Ser-Ile-Ser-Xaa₄-
Gln-[linker]-Leu-Asn-Pro-Glu-Ser-Lys-Ala-Ile-Lys-Asn-Leu-Leu-Lys-(OH)NH₂
(SEQ ID NO:391)
b229) RNH-Val-Pro-Leu-Ser-Xaa₃-Thr-Val-Arg-Xaa₁-Thr-Xaa₂-Ile-Ser-Ile-Ser-Xaa₄-
Gln-[linker]-Leu-Asn-Pro-Glu-Ser-Lys-Ala-Ile-Lys-Asn-Leu-Leu-Lys-(OH)NH₂
(SEQ ID NO:392)
b230) RNH-Val-Pro-Leu-Ser-Arg-Xaa₃-Val-Arg-Xaa₁-Thr-Xaa₂-Ile-Ser-Ile-Ser-Xaa₄-
Gln-[linker]-Leu-Asn-Pro-Glu-Ser-Lys-Ala-Ile-Lys-Asn-Leu-Leu-Lys-(OH)NH₂
(SEQ ID NO:393)
b231) RNH-Val-Pro-Leu-Ser-Arg-Thr-Xaa₃-Arg-Xaa₁-Thr-Xaa₂-Ile-Ser-Ile-Ser-Xaa₄-
Gln-[linker]-Leu-Asn-Pro-Glu-Ser-Lys-Ala-Ile-Lys-Asn-Leu-Leu-Lys-(OH)NH₂
(SEQ ID NO:394)
b232) RNH-Val-Pro-Leu-Ser-Arg-Thr-Val-Xaa₃-Xaa₁-Thr-Xaa₂-Ile-Ser-Ile-Ser-Xaa₄-
Gln-[linker]-Leu-Asn-Pro-Glu-Ser-Lys-Ala-Ile-Lys-Asn-Leu-Leu-Lys-(OH)NH₂
(SEQ ID NO:395)
b233) RNH-Val-Pro-Leu-Ser-Arg-Thr-Val-Arg-Cys-Thr-Cys-Ile-Ser-Ile-Ser-Gln-
Xaa₄-[linker]-Leu-Asn-Pro-Glu-Ser-Lys-Ala-Ile-Lys-Asn-Leu-Leu-Lys-(OH)NH₂
(SEQ ID NO:396)
b234) RNH-Xaa₃-Pro-Leu-Ser-Arg-Thr-Val-Arg-Xaa₁-Thr-Xaa₂-Ile-Ser-Ile-Ser-Gln-
Xaa₄-[linker]-Leu-Asn-Pro-Glu-Ser-Lys-Ala-Ile-Lys-Asn-Leu-Leu-Lys-(OH)NH₂
(SEQ ID NO:397)
b235) RNH-Val-Xaa₃-Leu-Ser-Arg-Thr-Val-Arg-Xaa₁-Thr-Xaa₂-Ile-Ser-Ile-Ser-Gln-
Xaa₄-[linker]-Leu-Asn-Pro-Glu-Ser-Lys-Ala-Ile-Lys-Asn-Leu-Leu-Lys-(OH)NH₂
(SEQ ID NO:398)
b236) RNH-Val-Pro-Xaa₃-Ser-Arg-Thr-Val-Arg-Xaa₁-Thr-Xaa₂-Ile-Ser-Ile-Ser-Gln-
Xaa₄-[linker]-Leu-Asn-Pro-Glu-Ser-Lys-Ala-Ile-Lys-Asn-Leu-Leu-Lys-(OH)NH₂
(SEQ ID NO:399)
b237) RNH-Val-Pro-Leu-Xaa₃-Arg-Thr-Val-Arg-Xaa₁-Thr-Xaa₂-Ile-Ser-Ile-Ser-Gln-
Xaa₄-[linker]-Leu-Asn-Pro-Glu-Ser-Lys-Ala-Ile-Lys-Asn-Leu-Leu-Lys-(OH)NH₂
(SEQ ID NO:400)
b238) RNH-Val-Pro-Leu-Ser-Xaa₃-Thr-Val-Arg-Xaa₁-Thr-Xaa₂-Ile-Ser-Ile-Ser-Gln-
Xaa₄-[linker]-Leu-Asn-Pro-Glu-Ser-Lys-Ala-Ile-Lys-Asn-Leu-Leu-Lys-(OH)NH₂
(SEQ ID NO:401)
b239) RNH-Val-Pro-Leu-Ser-Arg-Xaa₃-Val-Arg-Xaa₁-Thr-Xaa₂-Ile-Ser-Ile-Ser-Gln-
Xaa₄-[linker]-Leu-Asn-Pro-Glu-Ser-Lys-Ala-Ile-Lys-Asn-Leu-Leu-Lys-(OH)NH₂
(SEQ ID NO:402)
b240) RNH-Val-Pro-Leu-Ser-Arg-Thr-Xaa₃-Arg-Xaa₁-Thr-Xaa₂-Ile-Ser-Ile-Ser-Gln-
Xaa₄-[linker]-Leu-Asn-Pro-Glu-Ser-Lys-Ala-Ile-Lys-Asn-Leu-Leu-Lys-(OH)NH₂
(SEQ ID NO:403)
b241) RNH-Val-Pro-Leu-Ser-Arg-Thr-Val-Xaa₃-Xaa₁-Thr-Xaa₂-Ile-Ser-Ile-Ser-Gln-
Xaa₄-[linker]-Leu-Asn-Pro-Glu-Ser-Lys-Ala-Ile-Lys-Asn-Leu-Leu-Lys-(OH)NH₂
IP-10-(1-17)-[linker]-IP-10-(59-71)-acid or amide
(SEQ ID NO:404)
b242) RNH-Val-Pro-Leu-Ser-Arg-Thr-Val-Arg-Cys-Thr-Cys-Ile-Ser-Ile-Ser-Asn-Gln-
[linker]-Lys-Ala-Ile-Lys-Asn-Leu-Leu-Lys-Ala-Val-Ser-Lys-Glu-(OH)NH₂
(SEQ ID NO:405)
b243) RNH-Xaa₃-Pro-Leu-Ser-Arg-Thr-Val-Arg-Xaa₁-Thr-Xaa₂-Ile-Ser-Ile-Ser-Asn-
Gln-[linker]-Lys-Ala-Ile-Lys-Asn-Leu-Leu-Lys-Ala-Val-Ser-Lys-Glu-(OH)NH₂
(SEQ ID NO:406)
b244) RNH-Val-Xaa₃-Leu-Ser-Arg-Thr-Val-Arg-Xaa₁-Thr-Xaa₂-Ile-Ser-Ile-Ser-Asn-
Gln-[linker]-Lys-Ala-Ile-Lys-Asn-Leu-Leu-Lys-Ala-Val-Ser-Lys-Glu-(OH)NH₂
(SEQ ID NO:407)
b245) RNH-Val-Pro-Xaa₃-Ser-Arg-Thr-Val-Arg-Xaa₁-Thr-Xaa₂-Ile-Ser-Ile-Ser-Asn-
Gln-[linker]-Lys-Ala-Ile-Lys-Asn-Leu-Leu-Lys-Ala-Val-Ser-Lys-Glu-(OH)NH₂
(SEQ ID NO:408)
b246) RNH-Val-Pro-Leu-Xaa₃-Arg-Thr-Val-Arg-Xaa₁-Thr-Xaa₂-Ile-Ser-Ile-Ser-Asn-
Gln-[linker]-Lys-Ala-Ile-Lys-Asn-Leu-Leu-Lys-Ala-Val-Ser-Lys-Glu-(OH)NH₂
(SEQ ID NO:409)
b247) RNH-Val-Pro-Leu-Ser-Xaa₃-Thr-Val-Arg-Xaa₁-Thr-Xaa₂-Ile-Ser-Ile-Ser-Asn-
Gln-[linker]-Lys-Ala-Ile-Lys-Asn-Leu-Leu-Lys-Ala-Val-Ser-Lys-Glu-(OH)NH₂
(SEQ ID NO:410)
b248) RNH-Val-Pro-Leu-Ser-Arg-Xaa₃-Val-Arg-Xaa₁-Thr-Xaa₂-Ile-Ser-Ile-Ser-Asn-
Gln-[linker]-Lys-Ala-Ile-Lys-Asn-Leu-Leu-Lys-Ala-Val-Ser-Lys-Glu-(OH)NH₂
(SEQ ID NO:411)
b249) RNH-Val-Pro-Leu-Ser-Arg-Thr-Xaa₃-Arg-Xaa₁-Thr-Xaa₂-Ile-Ser-Ile-Ser-Asn-
Gln-[linker]-Lys-Ala-Ile-Lys-Asn-Leu-Leu-Lys-Ala-Val-Ser-Lys-Glu-(OH)NH₂
(SEQ ID NO:412)
b250) RNH-Val-Pro-Leu-Ser-Arg-Thr-Val-Xaa₃-Xaa₁-Thr-Xaa₂-Ile-Ser-Ile-Ser-Asn-
Gln-[linker]-Lys-Ala-Ile-Lys-Asn-Leu-Leu-Lys-Ala-Val-Ser-Lys-Glu-(OH)NH₂
(SEQ ID NO:413)
b251) RNH-Val-Pro-Leu-Ser-Arg-Thr-Val-Arg-Cys-Thr-Cys-Xaa₄-Ser-Ile-Ser-Asn-
Gln-[linker]-Lys-Ala-Ile-Lys-Asn-Leu-Leu-Lys-Ala-Val-Ser-Lys-Glu-(OH)NH₂
(SEQ ID NO:414)
b252) RNH-Xaa₃-Pro-Leu-Ser-Arg-Thr-Val-Arg-Xaa₁-Thr-Xaa₂-Xaa₄-Ser-Ile-Ser-Asn-
Gln-[linker]-Lys-Ala-Ile-Lys-Asn-Leu-Leu-Lys-Ala-Val-Ser-Lys-Glu-(OH)NH₂
(SEQ ID NO:415)
b253) RNH-Val-Xaa₃-Leu-Ser-Arg-Thr-Val-Arg-Xaa₁-Thr-Xaa₂-Xaa₄-Ser-Ile-Ser-Asn-
Gln-[linker]-Lys-Ala-Ile-Lys-Asn-Leu-Leu-Lys-Ala-Val-Ser-Lys-Glu-(OH)NH₂
(SEQ ID NO:416)
b254) RNH-Val-Pro-Xaa₃-Ser-Arg-Thr-Val-Arg-Xaa₁-Thr-Xaa₂-Xaa₄-Ser-Ile-Ser-Asn-
Gln-[linker]-Lys-Ala-Ile-Lys-Asn-Leu-Leu-Lys-Ala-Val-Ser-Lys-Glu-(OH)NH₂
(SEQ ID NO:417)
b255) RNH-Val-Pro-Leu-Xaa₃-Arg-Thr-Val-Arg-Xaa₁-Thr-Xaa₂-Xaa₄-Ser-Ile-Ser-Asn-
Gln-[linker]-Lys-Ala-Ile-Lys-Asn-Leu-Leu-Lys-Ala-Val-Ser-Lys-Glu-(OH)NH₂
(SEQ ID NO:418)
b256) RNH-Val-Pro-Leu-Ser-Xaa₃-Thr-Val-Arg-Xaa₁-Thr-Xaa₂-Xaa₄-Ser-Ile-Ser-Asn-
Gln-[linker]-Lys-Ala-Ile-Lys-Asn-Leu-Leu-Lys-Ala-Val-Ser-Lys-Glu-(OH)NH₂
(SEQ ID NO:419)
b257) RNH-Val-Pro-Leu-Ser-Arg-Xaa₃-Val-Arg-Xaa₁-Thr-Xaa₂-Xaa₄-Ser-Ile-Ser-Asn-
Gln-[linker]-Lys-Ala-Ile-Lys-Asn-Leu-Leu-Lys-Ala-Val-Ser-Lys-Glu-(OH)NH₂
(SEQ ID NO:420)
b258) RNH-Val-Pro-Leu-Ser-Arg-Thr-Xaa₃-Arg-Xaa₁-Thr-Xaa₂-Xaa₁-Ser-Ile-Ser-Asn-
Gln-[linker]-Lys-Ala-Ile-Lys-Asn-Leu-Leu-Lys-Ala-Val-Ser-Lys-Glu-(OH)NH₂
(SEQ ID NO:421)
b259) RNH-Val-Pro-Leu-Ser-Arg-Thr-Val-Xaa₃-Xaa₁-Thr-Xaa₂-Xaa₄-Ser-Ile-Ser-Asn-
Gln-[linker]-Lys-Ala-Ile-Lys-Asn-Leu-Leu-Lys-Ala-Val-Ser-Lys-Glu-(OH)NH₂
(SEQ ID NO:422)
b260) RNH-Val-Pro-Leu-Ser-Arg-Thr-Val-Arg-Cys-Thr-Cys-Ile-Xaa₄-Ile-Ser-Asn-
Gln-[linker]-Lys-Ala-Ile-Lys-Asn-Leu-Leu-Lys-Ala-Val-Ser-Lys-Glu-(OH)NH₂
(SEQ ID NO:423)
b261) RNH-Xaa₃-Pro-Leu-Ser-Arg-Thr-Val-Arg-Xaa₁-Thr-Xaa₂-Ile-Xaa₁-Ile-Ser-Asn-
Gln-[linker]-Lys-Ala-Ile-Lys-Asn-Leu-Leu-Lys-Ala-Val-Ser-Lys-Glu-(OH)NH₂
(SEQ ID NO:424)
b262) RNH-Val-Xaa₃-Leu-Ser-Arg-Thr-Val-Arg-Xaa₁-Thr-Xaa₂-Ile-Xaa₄-Ile-Ser-Asn-
Gln-[linker]-Lys-Ala-Ile-Lys-Asn-Leu-Leu-Lys-Ala-Val-Ser-Lys-Glu-(OH)NH₂
(SEQ ID NO:425)
b263) RNH-Val-Pro-Xaa₃-Ser-Arg-Thr-Val-Arg-Xaa₁-Thr-Xaa₂-Ile-Xaa₄-Ile-Ser-Asn-
Gln-[linker]-Lys-Ala-Ile-Lys-Asn-Leu-Leu-Lys-Ala-Val-Ser-Lys-Glu-(OH)NH₂
(SEQ ID NO:426)
b264) RNH-Val-Pro-Leu-Xaa₃-Arg-Thr-Val-Arg-Xaa₁-Thr-Xaa₂-Ile-Xaa₄-Ile-Ser-Asn-
Gln-[linker]-Lys-Ala-Ile-Lys-Asn-Leu-Leu-Lys-Ala-Val-Ser-Lys-Glu-(OH)NH₂
(SEQ ID NO:427)
b265) RNH-Val-Pro-Leu-Ser-Xaa₃-Thr-Val-Arg-Xaa₁-Thr-Xaa₂-Ile-Xaa₄-Ile-Ser-Asn-
Gln-[linker]-Lys-Ala-Ile-Lys-Asn-Leu-Leu-Lys-Ala-Val-Ser-Lys-Glu-(OH)NH₂
(SEQ ID NO:428)
b266) RNH-Val-Pro-Leu-Ser-Arg-Xaa₃-Val-Arg-Xaa₁-Thr-Xaa₂-Ile-Xaa₄-Ile-Ser-Asn-
Gln-[linker]-Lys-Ala-Ile-Lys-Asn-Leu-Leu-Lys-Ala-Val-Ser-Lys-Glu-(OH)NH₂
(SEQ ID NO:429)
b267) RNH-Val-Pro-Leu-Ser-Arg-Thr-Xaa₃-Arg-Xaa₁-Thr-Xaa₂-Ile-Xaa₄-Ile-Ser-Asn-
Gln-[linker]-Lys-Ala-Ile-Lys-Asn-Leu-Leu-Lys-Ala-Val-Ser-Lys-Glu-(OH)NH₂
(SEQ ID NO:430)
b268) RNH-Val-Pro-Leu-Ser-Arg-Thr-Val-Xaa₃-Xaa₁-Thr-Xaa₂-Ile-Xaa₄-Ile-Ser-Asn-
Gln-[linker]-Lys-Ala-Ile-Lys-Asn-Leu-Leu-Lys-Ala-Val-Ser-Lys-Glu-(OH)NH₂
(SEQ ID NO:431)
b269) RNH-Val-Pro-Leu-Ser-Arg-Thr-Val-Arg-Cys-Thr-Cys-Ile-Ser-Xaa₄-Ser-Asn-
Gln-[linker]-Lys-Ala-Ile-Lys-Asn-Leu-Leu-Lys-Ala-Val-Ser-Lys-Glu-(OH)NH₂
(SEQ ID NO:432)
b270) RNH-Xaa₃-Pro-Leu-Ser-Arg-Thr-Val-Arg-Xaa₁-Thr-Xaa₂-Ile-Ser-Xaa₁-Ser-Asn-
Gln-[linker]-Lys-Ala-Ile-Lys-Asn-Leu-Leu-Lys-Ala-Val-Ser-Lys-Glu-(OH)NH₂
(SEQ ID NO:433)
b271) RNH-Val-Xaa₃-Leu-Ser-Arg-Thr-Val-Arg-Xaa₁-Thr-Xaa₂-Ile-Ser-Xaa₄-Ser-Asn-
Gln-[linker]-Lys-Ala-Ile-Lys-Asn-Leu-Leu-Lys-Ala-Val-Ser-Lys-Glu-(OH)NH₂
(SEQ ID NO:434)
b272) RNH-Val-Pro-Xaa₃-Ser-Arg-Thr-Val-Arg-Xaa₁-Thr-Xaa₂-Ile-Ser-Xaa₄-Ser-Asn-
Gln-[linker]-Lys-Ala-Ile-Lys-Asn-Leu-Leu-Lys-Ala-Val-Ser-Lys-Glu-(OH)NH₂
(SEQ ID NO:435)
b273) RNH-Val-Pro-Leu-Xaa₃-Arg-Thr-Val-Arg-Xaa₁-Thr-Xaa₂-Ile-Ser-Xaa₄-Ser-Asn-
Gln-[linker]-Lys-Ala-Ile-Lys-Asn-Leu-Leu-Lys-Ala-Val-Ser-Lys-Glu-(OH)NH₂
(SEQ ID NO:436)
b274) RNH-Val-Pro-Leu-Ser-Xaa₃-Thr-Val-Arg-Xaa₁-Thr-Xaa₂-Ile-Ser-Xaa₄-Ser-Asn-
Gln-[linker]-Lys-Ala-Ile-Lys-Asn-Leu-Leu-Lys-Ala-Val-Ser-Lys-Glu-(OH)NH₂
(SEQ ID NO:437)
b275) RNH-Val-Pro-Leu-Ser-Arg-Xaa₃-Val-Arg-Xaa₁-Thr-Xaa₂-Ile-Ser-Xaa₄-Ser-Asn-
Gln-[linker]-Lys-Ala-Ile-Lys-Asn-Leu-Leu-Lys-Ala-Val-Ser-Lys-Glu-(OH)NH₂
(SEQ ID NO:438)
b276) RNH-Val-Pro-Leu-Ser-Arg-Thr-Xaa₃-Arg-Xaa₁-Thr-Xaa₂-Ile-Ser-Xaa₄-Ser-Asn-
Gln-[linker]-Lys-Ala-Ile-Lys-Asn-Leu-Leu-Lys-Ala-Val-Ser-Lys-Glu-(OH)NH₂
(SEQ ID NO:439)
b277) RNH-Val-Pro-Leu-Ser-Arg-Thr-Val-Xaa₃-Xaa₁-Thr-Xaa₂-Ile-Ser-Xaa₄-Ser-Asn-
Gln-[linker]-Lys-Ala-Ile-Lys-Asn-Leu-Leu-Lys-Ala-Val-Ser-Lys-Glu-(OH)NH₂
(SEQ ID NO:440)
b278) RNH-Val-Pro-Leu-Ser-Arg-Thr-Val-Arg-Cys-Thr-Cys-Ile-Ser-Ile-Ser-Xaa₄-Gln-
[linker]-Lys-Ala-Ile-Lys-Asn-Leu-Leu-Lys-Ala-Val-Ser-Lys-Glu-(OH)NH₂
(SEQ ID NO:441)
b279) RNH-Xaa₃-Pro-Leu-Ser-Arg-Thr-Val-Arg-Xaa₁-Thr-Xaa₂-Ile-Ser-Ile-Ser-Xaa₁-
Gln-[linker]-Lys-Ala-Ile-Lys-Asn-Leu-Leu-Lys-Ala-Val-Ser-Lys-Glu-(OH)NH₂
(SEQ ID NO:442)
b280) RNH-Val-Xaa₃-Leu-Ser-Arg-Thr-Val-Arg-Xaa₁-Thr-Xaa₂-Ile-Ser-Ile-Ser-Xaa₄-
Gln-[linker]-Lys-Ala-Ile-Lys-Asn-Leu-Leu-Lys-Ala-Val-Ser-Lys-Glu-(OH)NH₂
(SEQ ID NO:443)
b281) RNH-Val-Pro-Xaa₃-Ser-Arg-Thr-Val-Arg-Xaa₁-Thr-Xaa₂-Ile-Ser-Ile-Ser-Xaa₄-
Gln-[linker]-Lys-Ala-Ile-Lys-Asn-Leu-Leu-Lys-Ala-Val-Ser-Lys-Glu-(OH)NH₂
(SEQ ID NO:444)
b282) RNH-Val-Pro-Leu-Xaa₃-Arg-Thr-Val-Arg-Xaa₁-Thr-Xaa₂-Ile-Ser-Ile-Ser-Xaa₄-
Gln-[linker]-Lys-Ala-Ile-Lys-Asn-Leu-Leu-Lys-Ala-Val-Ser-Lys-Glu-(OH)NH₂
(SEQ ID NO:445)
b283) RNH-Val-Pro-Leu-Ser-Xaa₃-Thr-Val-Arg-Xaa₁-Thr-Xaa₂-Ile-Ser-Ile-Ser-Xaa₄-
Gln-[linker]-Lys-Ala-Ile-Lys-Asn-Leu-Leu-Lys-Ala-Val-Ser-Lys-Glu-(OH)NH₂
(SEQ ID NO:446)
b284) RNH-Val-Pro-Leu-Ser-Arg-Xaa₃-Val-Arg-Xaa₁-Thr-Xaa₂-Ile-Ser-Ile-Ser-Xaa₄-
Gln-[linker]-Lys-Ala-Ile-Lys-Asn-Leu-Leu-Lys-Ala-Val-Ser-Lys-Glu-(OH)NH₂
(SEQ ID NO:447)
b285) RNH-Val-Pro-Leu-Ser-Arg-Thr-Xaa₃-Arg-Xaa₁-Thr-Xaa₂-Ile-Ser-Ile-Ser-Xaa₄-
Gln-[linker]-Lys-Ala-Ile-Lys-Asn-Leu-Leu-Lys-Ala-Val-Ser-Lys-Glu-(OH)NH₂
(SEQ ID NO:448)
b286) RNH-Val-Pro-Leu-Ser-Arg-Thr-Val-Xaa₃-Xaa₁-Thr-Xaa₂-Ile-Ser-Ile-Ser-Xaa₄-
Gln-[linker]-Lys-Ala-Ile-Lys-Asn-Leu-Leu-Lys-Ala-Val-Ser-Lys-Glu-(OH)NH₂
(SEQ ID NO:449)
b287) RNH-Val-Pro-Leu-Ser-Arg-Thr-Val-Arg-Cys-Thr-Cys-Ile-Ser-Ile-Ser-Gln-Xaa₄-
[linker]-Lys-Ala-Ile-Lys-Asn-Leu-Leu-Lys-Ala-Val-Ser-Lys-Glu-(OH)NH₂
(SEQ ID NO:450)
b288) RNH-Xaa₃-Pro-Leu-Ser-Arg-Thr-Val-Arg-Xaa₁-Thr-Xaa₂-Ile-Ser-Ile-Ser-Gln-
Xaa₄-[linker]-Lys-Ala-Ile-Lys-Asn-Leu-Leu-Lys-Ala-Val-Ser-Lys-Glu-(OH)NH₂
(SEQ ID NO:451)
b289) RNH-Val-Xaa₃-Leu-Ser-Arg-Thr-Val-Arg-Xaa₁-Thr-Xaa₂-Ile-Ser-Ile-Ser-Gln-
Xaa₄-[linker]-Lys-Ala-Ile-Lys-Asn-Leu-Leu-Lys-Ala-Val-Ser-Lys-Glu-(OH)NH₂
(SEQ ID NO:452)
b290) RNH-Val-Pro-Xaa₃-Ser-Arg-Thr-Val-Arg-Xaa₁-Thr-Xaa₂-Ile-Ser-Ile-Ser-Gln-
Xaa₄-[linker]-Lys-Ala-Ile-Lys-Asn-Leu-Leu-Lys-Ala-Val-Ser-Lys-Glu-(OH)NH₂
(SEQ ID NO:453)
b291) RNH-Val-Pro-Leu-Xaa₃-Arg-Thr-Val-Arg-Xaa₁-Thr-Xaa₂-Ile-Ser-Ile-Ser-Gln-
Xaa₄-[linker]-Lys-Ala-Ile-Lys-Asn-Leu-Leu-Lys-Ala-Val-Ser-Lys-Glu-(OH)NH₂
(SEQ ID NO:454)
b292) RNH-Val-Pro-Leu-Ser-Xaa₃-Thr-Val-Arg-Xaa₁-Thr-Xaa₂-Ile-Ser-Ile-Ser-Gln-
Xaa₁-[linker]-Lys-Ala-Ile-Lys-Asn-Leu-Leu-Lys-Ala-Val-Ser-Lys-Glu-(OH)NH₂
(SEQ ID NO:455)
b293) RNH-Val-Pro-Leu-Ser-Arg-Xaa₃-Val-Arg-Xaa₁-Thr-Xaap₂-Ile-Ser-Ile-Ser-Gln-
Xaa₄-[linker]-Lys-Ala-Ile-Lys-Asn-Leu-Leu-Lys-Ala-Val-Ser-Lys-Glu-(OH)NH₂
(SEQ ID NO:456)
b294) RNH-Val-Pro-Leu-Ser-Arg-Thr-Xaa₃-Arg-Xaa₁-Thr-Xaa₂-Ile-Ser-Ile-Ser-Gln-
Xaa₄-[linker]-Lys-Ala-Ile-Lys-Asn-Leu-Leu-Lys-Ala-Val-Ser-Lys-Glu-(OH)NH₂
(SEQ ID NO:457)
b295) RNH-Val-Pro-Leu-Ser-Arg-Thr-Val-Xaa₃-Xaa₁-Thr-Xaa₂-Ile-Ser-Ile-Ser-Gln-
Xaa₄-[linker]-Lys-Ala-Ile-Lys-Asn-Leu-Leu-Lys-Ala-Val-Ser-Lys-Glu-(OH)NH₂

[0127] Preferred embodiments of cyclic IP-10 analogs of the present invention corresponding to a portion the N-terminal region joined with a linker to a cyclic portion of the C-terminal region of IP-10 having the following structures (underlined residues are cyclized):

IP-10-(1-14)-[linker]-IP-10-(65-77)-cyclic (Glu71-Lys74) acid or amide
(SEQ ID NO:458)
b296) RNH-Val-Pro-Leu-Ser-Arg-Thr-Val-Arg-Cys-Thr-Cys-Ile-Ser-Ile-[linker]-Leu-
Lys-Ala-Val-Ser-Lys-Glu-Met-Ser-Lys-Arg-Ser-Pro-(OH)NH₂
(SEQ ID NO:459)
b297) RNH-Xaa₃-Pro-Leu-Ser-Arg-Thr-Val-Arg-Xaa₁-Thr-Xaa₂-Ile-Ser-Ile-[linker]-
Leu-Lys-Ala-Val-Ser-Lys-Glu-Met-Ser-Lys-Arg-Ser-Pro-(OH)NH₂
(SEQ ID NO:460)
b298) RNH-Val-Xaa₃-Leu-Ser-Arg-Thr-Val-Arg-Xaa₁-Thr-Xaa₂-Ile-Ser-Ile-[linker]-
Leu-Lys-Ala-Val-Ser-Lys-Glu-Met-Ser-Lys-Arg-Ser-Pro-(OH)NH₂
(SEQ ID NO:461)
b299) RNH-Val-Pro-Xaa₃-Ser-Arg-Thr-Val-Arg-Xaa₁-Thr-Xaa₂-Ile-Ser-Ile-[linker]-
Leu-Lys-Ala-Val-Ser-Lys-Glu-Met-Ser-Lys-Arg-Ser-Pro-(OH)NH₂
(SEQ ID NO:462)
b300) RNH-Val-Pro-Leu-Xaa₃-Arg-Thr-Val-Arg-Xaa₁-Thr-Xaa₂-Ile-Ser-Ile-[linker]-
Leu-Lys-Ala-Val-Ser-Lys-Glu-Met-Ser-Lys-Arg-Ser-Pro-(OH)NH₂
(SEQ ID NO:463)
b301) RNH-Val-Pro-Leu-Ser-Xaa₃-Thr-Val-Arg-Xaa₁-Thr-Xaa₂-Ile-Ser-Ile-[linker]-
Leu-Lys-Ala-Val-Ser-Lys-Glu-Met-Ser-Lys-Arg-Ser-Pro-(OH)NH₂
(SEQ ID NO:464)
b302) RNH-Val-Pro-Leu-Ser-Arg-Xaa₃-Val-Arg-Xaa₁-Thr-Xaa₂-Ile-Ser-Ile-[linker]-
Leu-Lys-Ala-Val-Ser-Lys-Glu-Met-Ser-Lys-Arg-Ser-Pro-(OH)NH₂
(SEQ ID NO:465)
b303) RNH-Val-Pro-Leu-Ser-Arg-Thr-Xaa₃-Arg-Xaa₁-Thr-Xaa₂-Ile-Ser-Ile-[linker]-
Leu-Lys-Ala-Val-Ser-Lys-Glu-Met-Ser-Lys-Arg-Ser-Pro-(OH)NH₂
(SEQ ID NO:466)
b304) RNH-Val-Pro-Leu-Ser-Arg-Thr-Val-Xaa₃-Xaa₁-Thr-Xaa₂-Ile-Ser-Ile-[linker]-
Leu-Lys-Ala-Val-Ser-Lys-Glu-Met-Ser-Lys-Arg-Ser-Pro-(OH)NH₂
(SEQ ID NO:467)
b305) RNH-Val-Pro-Leu-Ser-Arg-Thr-Val-Arg-Cys-Thr-Cys-Xaa₄-Ser-Ile-[linker]-
Leu-Lys-Ala-Val-Ser-Lys-Glu-Met-Ser-Lys-Arg-Ser-Pro-(OH)NH₂
(SEQ ID NO:468)
b306) RNH-Xaa₃-Pro-Leu-Ser-Arg-Thr-Val-Arg-Xaa₁-Thr-Xaa₂-Xaa₄-Ser-Ile-[linker]-
Leu-Lys-Ala-Val-Ser-Lys-Glu-Met-Ser-Lys-Arg-Ser-Pro-(OH)NH₂
(SEQ ID NO:469)
b307) RNH-Val-Xaa₃-Leu-Ser-Arg-Thr-Val-Arg-Xaa₁-Thr-Xaa₂-Xaa₄-Ser-Ile-[linker]-
Leu-Lys-Ala-Val-Ser-Lys-Glu-Met-Ser-Lys-Arg-Ser-Pro-(OH)NH₂
(SEQ ID NO:470)
b308) RNH-Val-Pro-Xaa₃-Ser-Arg-Thr-Val-Arg-Xaa₁-Thr-Xaa₂-Xaa₄-Ser-Ile-[linker]-
Leu-Lys-Ala-Val-Ser-Lys-Glu-Met-Ser-Lys-Arg-Ser-Pro-(OH)NH₂
(SEQ ID NO:471)
b309) RNH-Val-Pro-Leu-Xaa₃-Arg-Thr-Val-Arg-Xaa₁-Thr-Xaa₂-Xaa₄-Ser-Ile-[linker]-
Leu-Lys-Ala-Val-Ser-Lys-Glu-Met-Ser-Lys-Arg-Ser-Pro-(OH)NH₂
(SEQ ID NO:472)
b310) RNH-Val-Pro-Leu-Ser-Xaa₃-Thr-Val-Arg-Xaa₁-Thr-Xaa₂-Xaa₄-Ser-Ile-[linker]-
Leu-Lys-Ala-Val-Ser-Lys-Glu-Met-Ser-Lys-Arg-Ser-Pro-(OH)NH₂
(SEQ ID NO:473)
b311) RNH-Val-Pro-Leu-Ser-Arg-Xaa₃-Val-Arg-Xaa₁-Thr-Xaa₂-Xaa₄-Ser-Ile-[linker]-
Leu-Lys-Ala-Val-Ser-Lys-Glu-Met-Ser-Lys-Arg-Ser-Pro-(OH)NH₂
(SEQ ID NO:474)
b312) RNH-Val-Pro-Leu-Ser-Arg-Thr-Xaa₃-Arg-Xaa₁-Thr-Xaa₂-Xaa₄-Ser-Ile-[linker]-
Leu-Lys-Ala-Val-Ser-Lys-Glu-Met-Ser-Lys-Arg-Ser-Pro-(OH)NH₂
(SEQ ID NO:475)
b313) RNH-Val-Pro-Leu-Ser-Arg-Thr-Val-Xaa₃-Xaa₁-Thr-Xaa₂-Xaa₄-Ser-Ile-[linker]-
Leu-Lys-Ala-Val-Ser-Lys-Glu-Met-Ser-Lys-Arg-Ser-Pro-(OH)NH₂
(SEQ ID NO:476)
b314) RNH-Val-Pro-Leu-Ser-Arg-Thr-Val-Arg-Cys-Thr-Cys-Ile-Xaa₄-Ile-[linker]-
Leu-Lys-Ala-Val-Ser-Lys-Glu-Met-Ser-Lys-Arg-Ser-Pro-(OH)NH₂
(SEQ ID NO:477)
b315) RNH-Xaa₃-Pro-Leu-Ser-Arg-Thr-Val-Arg-Xaa₁-Thr-Xaa₂-Ile-Xaa₄-Ile-[linker]-
Leu-Lys-Ala-Val-Ser-Lys-Glu-Met-Ser-Lys-Arg-Ser-Pro-(OH)NH₂
(SEQ ID NO:478)
b316) RNH-Val-Xaa₃-Leu-Ser-Arg-Thr-Val-Arg-Xaa₁-Thr-Xaa₂-Ile-Xaa₄-Ile-[linker]-
Leu-Lys-Ala-Val-Ser-Lys-Glu-Met-Ser-Lys-Arg-Ser-Pro-(OH)NH₂
(SEQ ID NO:479)
b317) RNH-Val-Pro-Xaa₃-Ser-Arg-Thr-Val-Arg-Xaa₁-Thr-Xaa₂-Ile-Xaa₄-Ile-[linker]-
Leu-Lys-Ala-Val-Ser-Lys-Glu-Met-Ser-Lys-Arg-Ser-Pro-(OH)NH₂
(SEQ ID NO:480)
b318) RNH-Val-Pro-Leu-Xaa₃-Arg-Thr-Val-Arg-Xaa₁-Thr-Xaa₂-Ile-Xaa₄-Ile-[linker]-
Leu-Lys-Ala-Val-Ser-Lys-Glu-Met-Ser-Lys-Arg-Ser-Pro-(OH)NH₂
(SEQ ID NO:481)
b319) RNH-Val-Pro-Leu-Ser-Xaa₃-Thr-Val-Arg-Xaa₁-Thr-Xaa₂-Ile-Xaa₄-Ile-[linker]-
Leu-Lys-Ala-Val-Ser-Lys-Glu-Met-Ser-Lys-Arg-Ser-Pro-(OH)NH₂
(SEQ ID NO:482)
b320) RNH-Val-Pro-Leu-Ser-Arg-Xaa₃-Val-Arg-Xaa₁-Thr-Xaa₂-Ile-Xaa₄-Ile-[linker]-
Leu-Lys-Ala-Val-Ser-Lys-Glu-Met-Ser-Lys-Arg-Ser-Pro-(OH)NH₂
(SEQ ID NO:483)
b321) RNH-Val-Pro-Leu-Ser-Arg-Thr-Xaa₃-Arg-Xaa₁-Thr-Xaa₂-Ile-Xaa₄-Ile-[linker]-
Leu-Lys-Ala-Val-Ser-Lys-Glu-Met-Ser-Lys-Arg-Ser-Pro-(OH)NH₂
(SEQ ID NO:484)
b322) RNH-Val-Pro-Leu-Ser-Arg-Thr-Val-Xaa₃-Xaa₁-Thr-Xaa₂-Ile-Xaa₄-Ile- [linker]-
Leu-Lys-Ala-Val-Ser-Lys-Glu-Met-Ser-Lys-Arg-Ser-Pro-(OH)NH₂
(SEQ ID NO:485)
b323) RNH-Val-Pro-Leu-Ser-Arg-Thr-Val-Arg-Cys-Tbr-Cys-Ile-Ser-Xaa₄-[linker]-
Leu-Lys-Ala-Val-Ser-Lys-Glu-Met-Ser-Lys-Arg-Ser-Pro-(OH)NH₂
(SEQ ID NO:486)
b324) RNH-Xaa₃-Pro-Leu-Ser-Arg-Thr-Val-Arg-Xaa₁-Thr-Xaa₂-Ile-Ser-Xaa₄-[linker]-
Leu-Lys-Ala-Val-Ser-Lys-Glu-Met-Ser-Lys-Arg-Ser-Pro-(OH)NH₂
(SEQ ID NO:487)
b325) RNH-Val-Xaa₃-Leu-Ser-Arg-Thr-Val-Arg-Xaa₁-Thr-Xaa₂-Ile-Ser-Xaa₄-[linker]-
Leu-Lys-Ala-Val-Ser-Lys-Glu-Met-Ser-Lys-Arg-Ser-Pro-(OH)NH₂
(SEQ ID NO:488)
b326) RNH-Val-Pro-Xaa₃-Ser-Arg-Thr-Val-Arg-Xaa₁-Thr-Xaa₂-Ile-Ser-Xaa₄-[linker]-
Leu-Lys-Ala-Val-Ser-Lys-Glu-Met-Ser-Lys-Arg-Ser-Pro-(OH)NH₂
(SEQ ID NO:489)
b327) RNH-Val-Pro-Leu-Xaa₃-Arg-Thr-Val-Arg-Xaa₁-Thr-Xaa₂-Ile-Ser-Xaa₄-[linker]-
Leu-Lys-Ala-Val-Ser-Lys-Glu-Met-Ser-Lys-Arg-Ser-Pro-(OH)NH₂
(SEQ ID NO:490)
b328) RNH-Val-Pro-Leu-Ser-Xaa₃-Thr-Val-Arg-Xaa₁-Thr-Xaa₂-Ile-Ser-Xaa₄-[linker]-
Leu-Lys-Ala-Val-Ser-Lys-Glu-Met-Ser-Lys-Arg-Ser-Pro-(OH)NH₂
(SEQ ID NO:491)
b329) RNH-Val-Pro-Leu-Ser-Arg-Xaa₃-Val-Arg-Xaa₁-Thr-Xaa₂-Ile-Ser-Xaa₄-[linker]-
Leu-Lys-Ala-Val-Ser-Lys-Glu-Met-Ser-Lys-Arg-Ser-Pro-(OH)NH₂
(SEQ ID NO:492)
b330) RNH-Val-Pro-Leu-Ser-Arg-Thr-Xaa₃-Arg-Xaa₁-Thr-Xaa₂-Ile-Ser-Xaa₄-[linker]-
Leu-Lys-Ala-Val-Ser-Lys-Glu-Met-Ser-Lys-Arg-Ser-Pro-(OH)NH₂
(SEQ ID NO:493)
b331) RNH-Val-Pro-Leu-Ser-Arg-Thr-Val-Xaa₃-Xaa₁-Thr-Xaa₂-Ile-Ser-Xaa₄-[linker]-
Leu-Lys-Ala-Val-Ser-Lys-Glu-Met-Ser-Lys-Arg-Ser-Pro-(OH)NH₂
IP-10-(1-17)-[linker]-IP-10-(65-77)-cyclic (Glu71-Lys74) acid or amide
(SEQ ID NO:494)
b332) RNH-Val-Pro-Leu-Ser-Arg-Thr-Val-Arg-Cys-Thr-Cys-Ile-Ser-Ile-Ser-Asn-Gln-
[linker]-Leu-Lys-Ala-Val-Ser-Lys-Glu-Met-Ser-Lys-Arg-Ser-Pro-(OH)NH₂
(SEQ ID NO:495)
b333) RNH-Xaa₃-Pro-Leu-Ser-Arg-Thr-Val-Arg-Xaa₁-Thr-Xaa₂-Ile-Ser-Ile-Ser-Asn-
Gln-[linker]-Leu-Lys-Ala-Val-Ser-Lys-Glu-Met-Ser-Lys-Arg-Ser-Pro-(OH)NH₂
(SEQ ID NO:496)
b334) RNH-Val-Xaa₃-Leu-Ser-Arg-Thr-Val-Arg-Xaa₁-Thr-Xaa₂-Ile-Ser-Ile-Ser-Asn-
Gln-[linker]-Leu-Lys-Ala-Val-Ser-Lys-Glu-Met-Ser-Lys-Arg-Ser-Pro-(OH)NH₂
(SEQ ID NO:497)
b335) RNH-Val-Pro-Xaa₃-Ser-Arg-Thr-Val-Arg-Xaa₁-Thr-Xaa₂-Ile-Ser-Ile-Ser-Asn-
Gln-[linker]-Leu-Lys-Ala-Val-Ser-Lys-Glu-Met-Ser-Lys-Arg-Ser-Pro-(OH)NH₂
(SEQ ID NO:498)
b336) RNH-Val-Pro-Leu-Xaa₃-Arg-Thr-Val-Arg-Xaa₁-Thr-Xaa₂-Ile-Ser-Ile-Ser-Asn-
Gln-[linker]-Leu-Lys-Ala-Val-Ser-Lys-Glu-Met-Ser-Lys-Arg-Ser-Pro-(OH)NH₂
(SEQ ID NO:499)
b337) RNH-Val-Pro-Leu-Ser-Xaa₃-Thr-Val-Arg-Xaa₁-Thr-Xaa₂-Ile-Ser-Ile-Ser-Asn-
Gln-[linker]-Leu-Lys-Ala-Val-Ser-Lys-Glu-Met-Ser-Lys-Arg-Ser-Pro-(OH)NH₂
(SEQ ID NO:500)
b338) RNH-Val-Pro-Leu-Ser-Arg-Xaa₃-Val-Arg-Xaa₁-Thr-Xaa₂-Ile-Ser-Ile-Ser-Asn-
Gln-[linker]-Leu-Lys-Ala-Val-Ser-Lys-Glu-Met-Ser-Lys-Arg-Ser-Pro-(OH)NH₂
(SEQ ID NO:501)
b339) RNH-Val-Pro-Leu-Ser-Arg-Thr-Xaa₃-Arg-Xaa₁-Thr-Xaa₂-Ile-Ser-Ile-Ser-Asn-
Gln-[linker]-Leu-Lys-Ala-Val-Ser-Lys-Glu-Met-Ser-Lys-Arg-Ser-Pro-(OH)NH₂
(SEQ ID NO:502)
b340) RNH-Val-Pro-Leu-Ser-Arg-Thr-Val-Xaa₃-Xaa₁-Thr-Xaa₂-Ile-Ser-Ile-Ser-Asn-
Gln-[linker]-Leu-Lys-Ala-Val-Ser-Lys-Glu-Met-Ser-Lys-Arg-Ser-Pro-(OH)NH₂
(SEQ ID NO:503)
b341) RNH-Val-Pro-Leu-Ser-Arg-Thr-Val-Arg-Cys-Thr-Cys-Xaa₄-Ser-Ile-Ser-Asn-
Gln-[linker]-Leu-Lys-Ala-Val-Ser-Lys-Glu-Met-Ser-Lys-Arg-Ser-Pro-(OH)NH₂
(SEQ ID NO:504)
b342) RNH-Xaa₃-Pro-Leu-Ser-Arg-Thr-Val-Arg-Xaa₁-Thr-Xaa₂-Xaa₄-Ser-Ile-Ser-Asn-
Gln-[linker]-Leu-Lys-Ala-Val-Ser-Lys-Glu-Met-Ser-Lys-Arg-Ser-Pro-(OH)NH₂
(SEQ ID NO:505)
b343) RNH-Val-Xaa₃-Leu-Ser-Arg-Thr-Val-Arg-Xaa₁-Thr-Xaa₂-Xaa₄-Ser-Ile-Ser-Asn-
Gln-[linker]-Leu-Lys-Ala-Val-Ser-Lys-Glu-Met-Ser-Lys-Arg-Ser-Pro-(OH)NH₂
(SEQ ID NO:506)
b344) RNH-Val-Pro-Xaa₃-Ser-Arg-Thr-Val-Arg-Xaa₁-Thr-Xaa₂-Xaa₄-Ser-Ile-Ser-Asn-
Gln-[linker]-Leu-Lys-Ala-Val-Ser-Lys-Glu-Met-Ser-Lys-Arg-Ser-Pro-(OH)NH₂
(SEQ ID NO:507)
b345) RNR-Val-Pro-Leu-Xaa₃-Arg-Thr-Val-Arg-Xaa₁-Thr-Xaa₂-Xaa₄-Ser-Ile-Ser-Asn-
Gln-[linker]-Leu-Lys-Ala-Val-Ser-Lys-Glu-Met-Ser-Lys-Arg-Ser-Pro-(OH)NH₂
(SEQ ID NO:508)
b346) RNH-Val-Pro-Leu-Ser-Xaa₃-Thr-Val-Arg-Xaa₁-Thr-Xaa₂-Xaa₄-Ser-Ile-Ser-Asn-
Gln-[linker]-Leu-Lys-Ala-Val-Ser-Lys-Glu-Met-Ser-Lys-Arg-Ser-Pro-(OH)NH₂
(SEQ ID NO:509)
b347) RNH-Val-Pro-Leu-Ser-Arg-Xaa₃-Val-Arg-Xaa₁-Thr-Xaa₂-Xaa₄-Ser-Ile-Ser-Asn-
Gln-[linker]-Leu-Lys-Ala-Val-Ser-Lys-Glu-Met-Ser-Lys-Arg-Ser-Pro-(OH)NH₂
(SEQ ID NO:510)
b348) RNH-Val-Pro-Leu-Ser-Arg-Thr-Xaa₃-Arg-Xaa₁-Thr-Xaa₂-Xaa₄-Ser-Ile-Ser-Asn-
Gln-[linker]-Leu-Lys-Ala-Val-Ser-Lys-Glu-Met-Ser-Lys-Arg-Ser-Pro-(OH)NH₂
(SEQ ID NO:511)
b349) RNH-Val-Pro-Leu-Ser-Arg-Thr-Val-Xaa₃-Xaa₁-Thr-Xaa₂-Xaa₄-Ser-Ile-Ser-Asn-
Gln-[linker]-Leu-Lys-Ala-Val-Ser-Lys-Glu-Met-Ser-Lys-Arg-Ser-Pro-(OH)NH₂
(SEQ ID NO:512)
b350) RNH-Val-Pro-Leu-Ser-Arg-Thr-Val-Arg-Cys-Thr-Cys-Ile-Xaa₄-Ile-Ser-Asn-
Gln- [linker]-Leu-Lys-Ala-Val-Ser-Lys-Glu-Met-Ser-Lys-Arg-Ser-Pro-(OH)NH₂
(SEQ ID NO:513)
b351) RNH-Xaa₃-Pro-Leu-Ser-Arg-Thr-Val-Arg-Xaa₁-Thr-Xaa₂-Ile-Xaa₁-Ile-Ser-Asn-
Gln-[linker]-Leu-Lys-Ala-Val-Ser-Lys-Glu-Met-Ser-Lys-Arg-Ser-Pro-(OH)NH₂
(SEQ ID NO:514)
b352) RNH-Val-Xaa₃-Leu-Ser-Arg-Thr-Val-Arg-Xaa₁-Thr-Xaa₂-Ile-Xaa₄-Ile-Ser-Asn-
Gln-[linker]-Leu-Lys-Ala-Val-Ser-Lys-Glu-Met-Ser-Lys-Arg-Ser-Pro-(OH)NH₂
(SEQ ID NO:515)
b353) RNH-Val-Pro-Xaa₃-Ser-Arg-Thr-Val-Arg-Xaa₁-Thr-Xaa₂-Ile-Xaa₄-Ile-Ser-Asn-
Gln-[linker]-Leu-Lys-Ala-Val-Ser-Lys-Glu-Met-Ser-Lys-Arg-Ser-Pro-(OH)NH₂
(SEQ ID NO:516)
b354) RNH-Val-Pro-Leu-Xaa₃-Arg-Thr-Val-Arg-Xaa₁-Thr-Xaa₂-Ile-Xaa₄-Ile-Ser-Asn-
Gln-[linker]-Leu-Lys-Ala-Val-Ser-Lys-Glu-Met-Ser-Lys-Arg-Ser-Pro-(OH)NH₂
(SEQ ID NO:517)
b355) RNH-Val-Pro-Leu-Ser-Xaa₃-Thr-Val-Arg-Xaa₁-Thr-Xaa₂-Ile-Xaa₄-Ile-Ser-Asn-
Gln-[linker]-Leu-Lys-Ala-Val-Ser-Lys-Glu-Met-Ser-Lys-Arg-Ser-Pro-(OH)NH₂
(SEQ ID NO:518)
b356) RNH-Val-Pro-Leu-Ser-Arg-Xaa₃-Val-Arg-Xaa₁-Thr-Xaa₂-Ile-Xaa₄-Ile-Ser-Asn-
Gln-[linker]-Leu-Lys-Ala-Val-Ser-Lys-Glu-Met-Ser-Lys-Arg-Ser-Pro-(OH)NH₂
(SEQ ID NO:519)
b357) RNH-Val-Pro-Leu-Ser-Arg-Thr-Xaa₃-Arg-Xaa₁-Thr-Xaa₂-Ile-Xaa₄-Ile-Ser-Asn-
Gln-[linker]-Leu-Lys-Ala-Val-Ser-Lys-Glu-Met-Ser-Lys-Arg-Ser-Pro-(OH)NH₂
(SEQ ID NO:520)
b358) RNH-Val-Pro-Leu-Ser-Arg-Thr-Val-Xaa₃-Xaa₁-Thr-Xaa₂-Ile-Xaa₄-Ile-Ser-Asn-
Gln-[linker]-Leu-Lys-Ala-Val-Ser-Lys-Glu-Met-Ser-Lys-Arg-Ser-Pro-(OH)NH₂
(SEQ ID NO:521)
b359) RNH-Val-Pro-Leu-Ser-Arg-Thr-Val-Arg-Cys-Thr-Cys-Ile-Ser-Xaa₄-Ser-Asn-
Gln-[linker]-Leu-Lys-Ala-Val-Ser-Lys-Glu-Met-Ser-Lys-Arg-Ser-Pro-(OH)NH₂
(SEQ ID NO:522)
b360) RNH-Xaa₃-Pro-Leu-Ser-Arg-Thr-Val-Arg-Xaa₁-Thr-Xaa₂-Ile-Ser-Xaa₄-Ser-Asn-
Gln-[linker]-Leu-Lys-Ala-Val-Ser-Lys-Glu-Met-Ser-Lys-Arg-Ser-Pro-(OH)NH₂
(SEQ ID NO:523)
b361) RNH-Val-Xaa₃-Leu-Ser-Arg-Thr-Val-Arg-Xaa₁-Thr-Xaa₂-Ile-Ser-Xaa₄-Ser-Asn-
Gln-[linker]-Leu-Lys-Ala-Val-Ser-Lys-Glu-Met-Ser-Lys-Arg-Ser-Pro-(OH)NH₂
(SEQ ID NO:524)
b362) RNH-Val-Pro-Xaa₃-Ser-Arg-Thr-Val-Arg-Xaa₁-Thr-Xaa₂-Ile-Ser-Xaa₄-Ser-Asn-
Gln-[linker]-Leu-Lys-Ala-Val-Ser-Lys-Glu-Met-Ser-Lys-Arg-Ser-Pro-(OH)NH₂
(SEQ ID NO:525)
b363) RNH-Val-Pro-Leu-Xaa₃-Arg-Thr-Val-Arg-Xaa₁-Thr-Xaa₂-Ile-Ser-Xaa₄-Ser-Asn-
Gln-[linker]-Leu-Lys-Ala-Val-Ser-Lys-Glu-Met-Ser-Lys-Arg-Ser-Pro-(OH)NH₂
(SEQ ID NO:526)
b364) RNH-Val-Pro-Leu-Ser-Xaa₃-Thr-Val-Arg-Xaa₁-Thr-Xaa₂-Ile-Ser-Xaa₄-Ser-Asn-
Gln-[linker]-Leu-Lys-Ala-Val-Ser-Lys-Glu-Met-Ser-Lys-Arg-Ser-Pro-(OH)NH₂
(SEQ ID NO:527)
b365) RNH-Val-Pro-Leu-Ser-Arg-Xaa₃-Val-Arg-Xaa₁-Thr-Xaa₂-Ile-Ser-Xaa₄-Ser-Asn-
Gln-[linker]-Leu-Lys-Ala-Val-Ser-Lys-Glu-Met-Ser-Lys-Arg-Ser-Pro-(OH)NH₂
(SEQ ID NO:528)
b366) RNH-Val-Pro-Leu-Ser-Arg-Thr-Xaa₃-Arg-Xaa₁-Thr-Xaa₂-Ile-Ser-Xaa₄-Ser-Asn-
Gln-[linker]-Leu-Lys-Ala-Val-Ser-Lys-Glu-Met-Ser-Lys-Arg-Ser-Pro-(OH)NH₂
(SEQ ID NO:529)
b367) RNH-Val-Pro-Leu-Ser-Arg-Thr-Val-Xaa₃-Xaa₁-Thr-Xaa₂-Ile-Ser-Xaa₄-Ser-Asn-
Gln-[linker]-Leu-Lys-Ala-Val-Ser-Lys-Glu-Met-Ser-Lys-Arg-Ser-Pro-(OH)NH₂
(SEQ ID NO:530)
b368) RNH-Val-Pro-Leu-Ser-Arg-Thr-Val-Arg-Cys-Thr-Cys-Ile-Ser-Ile-Ser-Xaa₄-Gln-
[linker]-Leu-Lys-Ala-Val-Ser-Lys-Glu-Met-Ser-Lys-Arg-Ser-Pro-(OH)NH₂
(SEQ ID NO:531)
b369) RNH-Xaa₃-Pro-Leu-Ser-Arg-Thr-Val-Arg-Xaa₁-Thr-Xaa₂-Ile-Ser-Ile-Ser-Xaa₁-
Gln-[linker]-Leu-Lys-Ala-Val-Ser-Lys-Glu-Met-Ser-Lys-Arg-Ser-Pro-(OH)NH₂
(SEQ ID NO:532)
b370) RNH-Val-Xaa₃-Leu-Ser-Arg-Thr-Val-Arg-Xaa₁-Thr-Xaa₂-Ile-Ser-Ile-Ser-Xaa₄-
Gln-[linker]-Leu-Lys-Ala-Val-Ser-Lys-Glu-Met-Ser-Lys-Arg-Ser-Pro-(OH)NH₂
(SEQ ID NO:533)
b371) RNH-Val-Pro-Xaa₃-Ser-Arg-Thr-Val-Arg-Xaa₁-Thr-Xaa₂-Ile-Ser-Ile-Ser-Xaa₄-
Gln-[linker]-Leu-Lys-Ala-Val-Ser-Lys-Glu-Met-Ser-Lys-Arg-Ser-Pro-(OH)NH₂
(SEQ ID NO:534)
b372) RNH-Val-Pro-Leu-Xaa₃-Arg-Thr-Val-Arg-Xaa₁-Thr-Xaa₂-Ile-Ser-Ile-Ser-Xaa₄-
Gln-[linker]-Leu-Lys-Ala-Val-Ser-Lys-Glu-Met-Ser-Lys-Arg-Ser-Pro-(OH)NH₂
(SEQ ID NO:535)
b373) RNH-Val-Pro-Leu-Ser-Xaa₃-Thr-Val-Arg-Xaa₁-Thr-Xaa₂-Ile-Ser-Ile-Ser-Xaa₄-
Gln-[linker]-Leu-Lys-Ala-Val-Ser-Lys-Glu-Met-Ser-Lys-Arg-Ser-Pro-(OH)NH₂
(SEQ ID NO:536)
b374) RNH-Val-Pro-Leu-Ser-Arg-Xaa₃-Val-Arg-Xaa₁-Thr-Xaa₂-Ile-Ser-Ile-Ser-Xaa₄-
Gln-[linker]-Leu-Lys-Ala-Val-Ser-Lys-Glu-Met-Ser-Lys-Arg-Ser-Pro-(OH)NH₂
(SEQ ID NO:537)
b375) RNH-Val-Pro-Leu-Ser-Arg-Thr-Xaa₃-Arg-Xaa₁-Thr-Xaa₂-Ile-Ser-Ile-Ser-Xaa₄-
Gln-[linker]-Leu-Lys-Ala-Val-Ser-Lys-Glu-Met-Ser-Lys-Arg-Ser-Pro-(OH)NH₂
(SEQ ID NO:538)
b376) RNH-Val-Pro-Leu-Ser-Arg-Thr-Val-Xaa₃-Xaa₁-Thr-Xaa₂-Ile-Ser-Ile-Ser-Xaa₄-
Gln-[linker]-Leu-Lys-Ala-Val-Ser-Lys-Glu-Met-Ser-Lys-Arg-Ser-Pro-(OH)NH₂
(SEQ ID NO:539)
b377) RNH-Val-Pro-Leu-Ser-Arg-Thr-Val-Arg-Cys-Thr-Cys-Ile-Ser-Ile-Ser-Gln-
Xaa₄-[linker]-Leu-Lys-Ala-Val-Ser-Lys-Glu-Met-Ser-Lys-Arg-Ser-Pro-(OH)NH₂
(SEQ ID NO:540)
b378) RNH-Xaa₃-Pro-Leu-Ser-Arg-Thr-Val-Arg-Xaa₁-Thr-Xaa₂-Ile-Ser-Ile-Ser-Gln-
Xaa₄-[linker]-Leu-Lys-Ala-Val-Ser-Lys-Glu-Met-Ser-Lys-Arg-Ser-Pro-(OH)NH₂
(SEQ ID NO:541)
b379) RNH-Val-Xaa₃-Leu-Ser-Arg-Thr-Val-Arg-Xaa₁-Thr-Xaa₂-Ile-Ser-Ile-Ser-
GlnXaa₄-[linker]-Leu-Lys-Ala-Val-Ser-Lys-Glu-Met-Ser-Lys-Arg-Ser-Pro-(OH)NH₂
(SEQ ID NO:542)
b380) RNH-Val-Pro-Xaa₃-Ser-Arg-Thr-Val-Arg-Xaa₁-Thr-Xaa₂-Ile-Ser-Ile-Ser-
GlnXaa₄-[linker]-Leu-Lys-Ala-Val-Ser-Lys-Glu-Met-Ser-Lys-Arg-Ser-Pro-(OH)NH₂
(SEQ ID NO:543)
b381) RNH-Val-Pro-Leu-Xaa₃-Arg-Thr-Val-Arg-Xaa₁-Thr-Xaa₂-Ile-Ser-Ile-Ser-
GlnXaa₁-[linker]-Leu-Lys-Ala-Val-Ser-Lys-Glu-Met-Ser-Lys-Arg-Ser-Pro-(OH)NH₂
(SEQ ID NO:544)
b382) RNH-Val-Pro-Leu-Ser-Xaa₃-Thr-Val-Arg-Xaa₁-Thr-Xaa₂-Ile-Ser-Ile-Ser-
GlnXaa₁-[linker]-Leu-Lys-Ala-Val-Ser-Lys-Glu-Met-Ser-Lys-Arg-Ser-Pro-(OH)NH₂
(SEQ ID NO:545)
b383) RNH-Val-Pro-Leu-Ser-Arg-Xaa₃-Val-Arg-Xaa₁-Thr-Xaa₂-Ile-Ser-Ile-Ser-Gln-
Xaa₄-[linker]-Leu-Lys-Ala-Val-Ser-Lys-Glu-Met-Ser-Lys-Arg-Ser-Pro-(OH)NH₂
(SEQ ID NO:546)
b384) RNH-Val-Pro-Leu-Ser-Arg-Thr-Xaa₃-Arg-Xaa₁-Thr-Xaa₂-Ile-Ser-Ile-Ser-Gln-
Xaa₄-[linker]-Leu-Lys-Ala-Val-Ser-Lys-Glu-Met-Ser-Lys-Arg-Ser-Pro-(OH)NH₂
(SEQ ID NO:548)
b385) RNH-Val-Pro-Leu-Ser-Arg-Thr-Val-Xaa₃-Xaa₁-Thr-Xaa₂-Ile-Ser-Ile-Ser-Gln-
Xaa₄-[linker]-Leu-Lys-Ala-Val-Ser-Lys-Glu-Met-Ser-Lys-Arg-Ser-Pro-(OH)NH₂
IP-10-(1-14)-[linker]-IP-10-(54-66)-cyclic(Glu57-Lys62) acid or amide
(SEQ ID NO:549)
b386) RNH-Val-Pro-Leu-Ser-Arg-Thr-Val-Arg-Cys-Thr-Cys-Ile-Ser-Ile-[linker]-Leu-
Asn-Pro-Glu-Ser-Lys-Ala-Ile-Lys-Asn-Leu-Leu-Lys-(OH)NH₂
(SEQ ID NO:550)
b387) RNH-Xaa₃-Pro-Leu-Ser-Arg-Thr-Val-Arg-Xaa₁-Thr-Xaa₂-Ile-Ser-Ile-[linker]-
Leu-Asn-Pro-Glu-Ser-Lys-Ala-Ile-Lys-Asn-Leu-Leu-Lys-(OH)NH₂
(SEQ ID NO:551)
b388) RNH-Val-Xaa₃-Leu-Ser-Arg-Thr-Val-Arg-Xaa₁-Thr-Xaa₂-Ile-Ser-Ile-[linker]-
Leu-Asn-Pro-Glu-Ser-Lys-Ala-Ile-Lys-Asn-Leu-Leu-Lys-(OH)NH₂
(SEQ ID NO:552)
b389) RNH-Val-Pro-Xaa₃-Ser-Arg-Thr-Val-Arg-Xaa₁-Thr-Xaa₂-Ile-Ser-Ile-[linker]-
Leu-Asn-Pro-Glu-Ser-Lys-Ala-Ile-Lys-Asn-Leu-Leu-Lys-(OH)NH₂
(SEQ ID NO:553)
b390) RNH-Val-Pro-Leu-Xaa₃-Arg-Thr-Val-Arg-Xaa₁-Thr-Xaa₂-Ile-Ser-Ile-[linker]-
Leu-Asn-Pro-Glu-Ser-Lys-Ala-Ile-Lys-Asn-Leu-Leu-Lys-(OH)NH₂
(SEQ ID NO:554)
b391) RNH-Val-Pro-Leu-Ser-Xaa₃-Thr-Val-Arg-Xaa₁-Thr-Xaa₂-Ile-Ser-Ile-[linker]-
Leu-Asn-Pro-Glu-Ser-Lys-Ala-Ile-Lys-Asn-Leu-Leu-Lys-(OH)NH₂
(SEQ ID NO:555)
b392) RNH-Val-Pro-Leu-Ser-Arg-Xaa₃-Val-Arg-Xaa₁-Thr-Xaa₂-Ile-Ser-Ile-[linker]-
Leu-Asn-Pro-Glu-Ser-Lys-Ala-Ile-Lys-Asn-Leu-Leu-Lys-(OH)NH₂
(SEQ ID NO:556)
b393) RNH-Val-Pro-Leu-Ser-Arg-Thr-Xaa₃-Arg-Xaa₁-Thr-Xaa₂-Ile-Ser-Ile-[linker]-
Leu-Asn-Pro-Glu-Ser-Lys-Ala-Ile-Lys-Asn-Leu-Leu-Lys-(OH)NH₂
(SEQ ID NO:557)
b394) RNH-Val-Pro-Leu-Ser-Arg-Thr-Val-Xaa₃-Xaa₁-Thr-Xaa₂-Ile-Ser-Ile-[linker]-
Leu-Asn-Pro-Glu-Ser-Lys-Ala-Ile-Lys-Asn-Leu-Leu-Lys-(OH)NH₂
(SEQ ID NO:558)
b395) RNH-Val-Pro-Leu-Ser-Arg-Thr-Val-Arg-Cys-Thr-Cys-Xaa₄Ser-Ile-[linker]-
Leu-Asn-Pro-Glu-Ser-Lys-Ala-Ile-Lys-Asn-Leu-Leu-Lys-(OH)NH₂
(SEQ ID NO:559)
b396) RNH-Xaa₃-Pro-Leu-Ser-Arg-Thr-Val-Arg-Xaa₁-Thr-Xaa₂-Xaa₁-Ser-Ile-[linker]-
Leu-Asn-Pro-Glu-Ser-Lys-Ala-Ile-Lys-Asn-Leu-Leu-Lys-(OH)NH₂
(SEQ ID NO:560)
b397) RNH-Val-Xaa₃-Leu-Ser-Arg-Thr-Val-Arg-Xaa₁-Thr-Xaa₂-Xaa₄-Ser-Ile-[linker]-
Leu-Asn-Pro-Glu-Ser-Lys-Ala-Ile-Lys-Asn-Leu-Leu-Lys-(OH)NH₂
(SEQ ID NO:561)
b398) RNH-Val-Pro-Xaa₃-Ser-Arg-Thr-Val-Arg-Xaa₁-Thr-Xaa₂-Xaa₄-Ser-Ile-[linker]-
Leu-Asn-Pro-Glu-Ser-Lys-Ala-Ile-Lys-Asn-Leu-Leu-Lys-(OH)NH₂
(SEQ ID NO:562)
b399) RNH-Val-Pro-Leu-Xaa₃-Arg-Thr-Val-Arg-Xaa₁-Thr-Xaa₂-Xaa₄-Ser-Ile-[linker]-
Leu-Asn-Pro-Glu-Ser-Lys-Ala-Ile-Lys-Asn-Leu-Leu-Lys-(OH)NH₂
(SEQ ID NO:563)
b400) RNH-Val-Pro-Leu-Ser-Xaa₃-Thr-Val-Arg-Xaa₁-Thr-Xaa₂-Xaa₄-Ser-Ile-[linker]-
Leu-Asn-Pro-Glu-Ser-Lys-Ala-Ile-Lys-Asn-Leu-Leu-Lys-(OH)NH₂
(SEQ ID NO:564)
b401) RNH-Val-Pro-Leu-Ser-Arg-Xaa₃-Val-Arg-Xaa₁-Thr-Xaa₂-Xaa₄-Ser-Ile-[linker]-
Leu-Asn-Pro-Glu-Ser-Lys-Ala-Ile-Lys-Asn-Leu-Leu-Lys-(OH)NH₂
(SEQ ID NO:565)
b402) RNH-Val-Pro-Leu-Ser-Arg-Thr-Xaa₃-Arg-Xaa₁-Thr-Xaa₂-Xaa₄-Ser-Ile-[linker]-
Leu-Asn-Pro-Glu-Ser-Lys-Ala-Ile-Lys-Asn-Leu-Leu-Lys-(OH)NH₂
(SEQ ID NO:566)
b403) RNH-Val-Pro-Leu-Ser-Arg-Thr-Val-Xaa₃-Xaa₁-Thr-Xaa₂-Xaa₄-Ser-Ile-[linker]-
Leu-Asn-Pro-Glu-Ser-Lys-Ala-Ile-Lys-Asn-Leu-Leu-Lys-(OH)NH₂
(SEQ ID NO:567)
b404) RNH-Val-Pro-Leu-Ser-Arg-Thr-Val-Arg-Cys-Thr-Cys-Ile-Xaa₄-Ile-[linker]-
Leu-Asn-Pro-Glu-Ser-Lys-Ala-Ile-Lys-Asn-Leu-Leu-Lys-(OH)NH₂
(SEQ ID NO:568)
b405) RNH-Xaa₃-Pro-Leu-Ser-Arg-Thr-Val-Arg-Xaa₁-Thr-Xaa₂-Ile-Xaa₄-Ile-[linker]-
Leu-Asn-Pro-Glu-Ser-Lys-Ala-Ile-Lys-Asn-Leu-Leu-Lys-(OH)NH₂
(SEQ ID NO:569)
b406) RNH-Val-Xaa₃-Leu-Ser-Arg-Thr-Val-Arg-Xaa₁-Thr-Xaa₂-Ile-Xaa₄-Ile-[linker]-
Leu-Asn-Pro-Glu-Ser-Lys-Ala-Ile-Lys-Asn-Leu-Leu-Lys-(OH)NH₂
(SEQ ID NO:570)
b407) RNH-Val-Pro-Xaa₃-Ser-Arg-Thr-Val-Arg-Xaa₁-Thr-Xaa₂-Ile-Xaa₄-Ile-[linker]-
Leu-Asn-Pro-Glu-Ser-Lys-Ala-Ile-Lys-Asn-Leu-Leu-Lys-(OH)NH₂
(SEQ ID NO:571)
b408) RNH-Val-Pro-Leu-Xaa₃-Arg-Thr-Val-Arg-Xaa₁-Thr-Xaa₂-Ile-Xaa₄-Ile-[linker]-
Leu-Asn-Pro-Glu-Ser-Lys-Ala-Ile-Lys-Asn-Leu-Leu-Lys-(OH)NH₂
(SEQ ID NO:572)
b409) RNH-Val-Pro-Leu-Ser-Xaa₃-Thr-Val-Arg-Xaa₁-Thr-Xaa₂-Ile-Xaa₄-Ile-[linker]-
Leu-Asn-Pro-Glu-Ser-Lys-Ala-Ile-Lys-Asn-Leu-Leu-Lys-(OH)NH₂
(SEQ ID NO:573)
b410) RNH-Val-Pro-Leu-Ser-Arg-Xaa₃-Val-Arg-Xaa₁-Thr-Xaa₂-Ile-Xaa₄-Ile-[linker]-
Leu-Asn-Pro-Glu-Ser-Lys-Ala-Ile-Lys-Asn-Leu-Leu-Lys-(OH)NH₂
(SEQ ID NO:574)
b411) RNH-Val-Pro-Leu-Ser-Arg-Thr-Xaa₃-Arg-Xaa₁-Thr-Xaa₂-Ile-Xaa₄-Ile-[linker]-
Leu-Asn-Pro-Glu-Ser-Lys-Ala-Ile-Lys-Asn-Leu-Leu-Lys-(OH)NH₂
(SEQ ID NO:575)
b412) RNH-Val-Pro-Leu-Ser-Arg-Thr-Val-Xaa₃-Xaa₁-Thr-Xaa₂-Ile-Xaa₄-Ile-[linker]-
Leu-Asn-Pro-Glu-Ser-Lys-Ala-Ile-Lys-Asn-Leu-Leu-Lys-(OH)NH₂
(SEQ ID NO:576)
b413) RNH-Val-Pro-Leu-Ser-Arg-Thr-Val-Arg-Cys-Thr-Cys-Ile-Ser-Xaa₄-[linker]-
Leu-Asn-Pro-Glu-Ser-Lys-Ala-Ile-Lys-Asn-Leu-Leu-Lys-(OH)NH₂
(SEQ ID NO:577)
b414) RNH-Xaa₃-Pro-Leu-Ser-Arg-Thr-Val-Arg-Xaa₁-Thr-Xaa₂-Ile-Ser-Xaa₄-[linker]-
Leu-Asn-Pro-Glu-Ser-Lys-Ala-Ile-Lys-Asn-Leu-Leu-Lys-(OH)NH₂
(SEQ ID NO:578)
b415) RNH-Val-Xaa₃-Leu-Ser-Arg-Thr-Val-Arg-Xaa₁-Thr-Xaa₂-Ile-Ser-Xaa₄-[linker]-
Leu-Asn-Pro-Glu-Ser-Lys-Ala-Ile-Lys-Asn-Leu-Leu-Lys-(OH)NH₂
(SEQ ID NO:579)
b416) RNH-Val-Pro-Xaa₃-Ser-Arg-Thr-Val-Arg-Xaa₁-Thr-Xaa₂-Ile-Ser-Xaa₁-[linker]-
Leu-Asn-Pro-Glu-Ser-Lys-Ala-Ile-Lys-Asn-Leu-Leu-Lys-(OH)NH₂
(SEQ ID NO:580)
b417) RNH-Val-Pro-Leu-Xaa₃-Arg-Thr-Val-Arg-Xaa₁-Thr-Xaa₂-Ile-Ser-Xaa₁-[linker]-
Leu-Asn-Pro-Glu-Ser-Lys-Ala-Ile-Lys-Asn-Leu-Leu-Lys-(OH)NH₂
(SEQ ID NO:581)
b418) RNH-Val-Pro-Leu-Ser-Xaa₃-Thr-Val-Arg-Xaa₁-Thr-Xaa₂-Ile-Ser-Xaa₄-[linker]-
Leu-Asn-Pro-Glu-Ser-Lys-Ala-Ile-Lys-Asn-Leu-Leu-Lys-(OH)NH₂
(SEQ ID NO:582)
b419) RNH-Val-Pro-Leu-Ser-Arg-Xaa₃-Val-Arg-Xaa₁-Thr-Xaa₂-Ile-Ser-Xaa₄-[linker]-
Leu-Asn-Pro-Glu-Ser-Lys-Ala-Ile-Lys-Asn-Leu-Leu-Lys-(OH)NH₂
(SEQ ID NO:583)
b420) RNH-Val-Pro-Leu-Ser-Arg-Thr-Xaa₃-Arg-Xaa₁-Thr-Xaa₂-Ile-Ser-Xaa₄-[linker]-
Leu-Asn-Pro-Glu-Ser-Lys-Ala-Ile-Lys-Asn-Leu-Leu-Lys-(OH)NH₂
(SEQ ID NO:584)
b421) RNH-Val-Pro-Leu-Ser-Arg-Thr-Val-Xaa₃-Xaa₁-Thr-Xaa₂-Ile-Ser-Xaa₄-[linker]-
Leu-Asn-Pro-Glu-Ser-Lys-Ala-Ile-Lys-Asn-Leu-Leu-Lys-(OH)NH₂
IP-10-(1-17)-[linker]-IP-10-(54-66)-cyclic(Glu57-Lys62) acid or amide
(SEQ ID NO:585)
b422) RNH-Val-Pro-Leu-Ser-Arg-Thr-Val-Arg-Cys-Thr-Cys-Ile-Ser-Ile-Ser-Asn-Gln-
[linker]-Leu-Asn-Pro-Glu-Ser-Lys-Ala-Ile-Lys-Asn-Leu-Leu-Lys-(OH)NH₂
(SEQ ID NO:586)
b423) RNH-Xaa₃-Pro-Leu-Ser-Arg-Thr-Val-Arg-Xaa₁-Thr-Xaa₂-Ile-Ser-Ile-Ser-Asn-
Gln-[linker]-Leu-Asn-Pro-Glu-Ser-Lys-Ala-Ile-Lys-Asn-Leu-Leu-Lys-(OH)NH₂
(SEQ ID NO:587)
b424) RNH-Val-Xaa₃-Leu-Ser-Arg-Thr-Val-Arg-Xaa₁-Thr-Xaa₂-Ile-Ser-Ile-Ser-Asn-
Gln-[linker]-Leu-Asn-Pro-Glu-Ser-Lys-Ala-Ile-Lys-Asn-Leu-Leu-Lys-(OH)NH₂
(SEQ ID NO:588)
b425) RNH-Val-Pro-Xaa₃-Ser-Arg-Thr-Val-Arg-Xaa₁-Thr-Xaa₂-Ile-Ser-Ile-Ser-Asn-
Gln-[linker]-Leu-Asn-Pro-Glu-Ser-Lys-Ala-Ile-Lys-Asn-Leu-Leu-Lys-(OH)NH₂
(SEQ ID NO:589)
b426) RNH-Val-Pro-Leu-Xaa₃-Arg-Thr-Val-Arg-Xaa₁-Thr-Xaa₂-Ile-Ser-Ile-Ser-Asn-
Gln-[linker]-Leu-Asn-Pro-Glu-Ser-Lys-Ala-Ile-Lys-Asn-Leu-Leu-Lys-(OH)NH₂
(SEQ ID NO:590)
b427) RNH-Val-Pro-Leu-Ser-Xaa₃-Thr-Val-Arg-Xaa₁-Thr-Xaa₂-Ile-Ser-Ile-Ser-Asn-
Gln-[linker]-Leu-Asn-Pro-Glu-Ser-Lys-Ala-Ile-Lys-Asn-Leu-Leu-Lys-(OH)NH₂
(SEQ ID NO:591)
b428) RNH-Val-Pro-Leu-Ser-Arg-Xaa₃-Val-Arg-Xaa₁-Thr-Xaa₂-Ile-Ser-Ile-Ser-Asn-
Gln-[linker]-Leu-Asn-Pro-Glu-Ser-Lys-Ala-Ile-Lys-Asn-Leu-Leu-Lys-(OH)NH₂
(SEQ ID NO:592)
b429) RNH-Val-Pro-Leu-Ser-Arg-Thr-Xaa₃-Arg-Xaa₁-Thr-Xaa₂-Ile-Ser-Ile-Ser-Asn-
Gln-[linker]-Leu-Asn-Pro-Glu-Ser-Lys-Ala-Ile-Lys-Asn-Leu-Leu-Lys-(OH)NH₂
(SEQ ID NO:593)
b430) RNH-Val-Pro-Leu-Ser-Arg-Thr-Val-Xaa₃-Xaa₁-Thr-Xaa₂-Ile-Ser-Ile-Ser-Asn-
Gln-[linker]-Leu-Asn-Pro-Glu-Ser-Lys-Ala-Ile-Lys-Asn-Leu-Leu-Lys-(OH)NH₂
(SEQ ID NO:594)
b431) RNH-Val-Pro-Leu-Ser-Arg-Thr-Val-Arg-Cys-Thr-Cys-Xaa₄-Ser-Ile-Ser-Asn-
Gln-[linker]-Leu-Asn-Pro-Glu-Ser-Lys-Ala-Ile-Lys-Asn-Leu-Leu-Lys-(OH)NH₂
(SEQ ID NO:595)
b432) RNH-Xaa₃-Pro-Leu-Ser-Arg-Thr-Val-Arg-Xaa₁-Thr-Xaa₂-Xaa₄-Ser-Ile-Ser-Asn-
Gln-[linker]-Leu-Asn-Pro-Glu-Lys-Ala-Ile-Lys-Asn-Leu-Leu-Lys-(OH)NH₂
(SEQ ID NO:596)
b433) RNH-Val-Xaa₃-Leu-Ser-Arg-Thr-Val-Arg-Xaa₁-Thr-Xaa₂-Xaa₄-Ser-Ile-Ser-Asn-
Gln-[linker]-Leu-Asn-Pro-Glu-Ser-Lys-Ala-Ile-Lys-Asn-Leu-Leu-Lys-(OH)NH₂
(SEQ ID NO:597)
b434) RNH-Val-Pro-Xaa₃-Ser-Arg-Thr-Val-Arg-Xaa₁-Thr-Xaa₂-Xaa₄-Ser-Ile-Ser-Asn-
Gln-[linker]-Leu-Asn-Pro-Glu-Ser-Lys-Ala-Ile-Lys-Asn-Leu-Leu-Lys-(OH)NH₂
(SEQ ID NO:598)
b435) RNH-Val-Pro-Leu-Xaa₃-Arg-Thr-Val-Arg-Xaa₁-Thr-Xaa₂-Xaa₄-Ser-Ile-Ser-Asn-
Gln-[linker]-Leu-Asn-Pro-Glu-Ser-Lys-Ala-Ile-Lys-Asn-Leu-Leu-Lys-(OH)NH₂
(SEQ ID NO:599)
b436) RNH-Val-Pro-Leu-Ser-Xaa₃-Thr-Val-Arg-Xaa₁-Thr-Xaa₂-Xaa₄-Ser-Ile-Ser-Asn-
Gln-[linker]-Leu-Asn-Pro-Glu-Ser-Lys-Ala-Ile-Lys-Asn-Leu-Leu-Lys-(OH)NH₂
(SEQ ID NO:600)
b437) RNH-Val-Pro-Leu-Ser-Arg-Xaa₃-Val-Arg-Xaa₁-Thr-Xaa₂-Xaa₄-Ser-Ile-Ser-Asn-
Gln-[linker]-Leu-Asn-Pro-Glu-Ser-Lys-Ala-Ile-Lys-Asn-Leu-Leu-Lys-(OH)NH₂
(SEQ ID NO:601)
b438) RNH-Val-Pro-Leu-Ser-Arg-Thr-Xaa₃-Arg-Xaa₁-Thr-Xaa₂-Xaa₄-Ser-Ile-Ser-Asn-
Gln-[linker]-Leu-Asn-Pro-Glu-Ser-Lys-Ala-Ile-Lys-Asn-Leu-Leu-Lys-(OH)NH₂
(SEQ ID NO:602)
b439) RNH-Val-Pro-Leu-Ser-Arg-Thr-Val-Xaa₃-Xaa₁-Thr-Xaa₂-Xaa₄-Ser-Ile-Ser-Asn-
Gln-[linker]-Leu-Asn-Pro-Glu-Ser-Lys-Ala-Ile-Lys-Asn-Leu-Leu-Lys-(OH)NH₂
(SEQ ID NO:603)
b440) RNH-Val-Pro-Leu-Ser-Arg-Thr-Val-Arg-Cys-Thr-Cys-Ile-Xaa₄-Ile-Ser-Asn-
Gln-[linker]-Leu-Asn-Pro-Glu-Ser-Lys-Ala-Ile-Lys-Asn-Leu-Leu-Lys-(OH)NH₂
(SEQ ID NO:604)
b441) RNH-Xaa₃-Pro-Leu-Ser-Arg-Thr-Val-Arg-Xaa₁-Thr-Xaa₂-Ile-Xaa₄-Ile-Ser-Asn-
Gln-[linker]-Leu-Asn-Pro-Glu-Ser-Lys-Ala-Ile-Lys-Asn-Leu-Leu-Lys-(OH)NH₂
(SEQ ID NO:605)
b442) RNH-Val-Xaa₃-Leu-Ser-Arg-Thr-Val-Arg-Xaa₁-Thr-Xaa₂-Ile-Xaa₄-Ile-Ser-Asn-
Gln-[linker]-Leu-Asn-Pro-Glu-Ser-Lys-Ala-Ile-Lys-Asn-Leu-Leu-Lys-(OH)NH₂
(SEQ ID NO:606)
b443) RNH-Val-Pro-Xaa₃-Ser-Arg-Thr-Val-Arg-Xaa₁-Thr-Xaa₂-Ile-Xaa₁-Ile-Ser-Asn-
Gln-[linker]-Leu-Asn-Pro-Glu-Ser-Lys-Ala-Ile-Lys-Asn-Leu-Leu-Lys-(OH)NH₂
(SEQ ID NO:607)
b444) RNH-Val-Pro-Leu-Xaa₃-Arg-Thr-Val-Arg-Xaa₁-Thr-Xaa₂-Ile-Xaa₄-Ile-Ser-Asn-
Gln-[linker]-Leu-Asn-Pro-Glu-Ser-Lys-Ala-Ile-Lys-Asn-Leu-Leu-Lys-(OH)NH₂
(SEQ ID NO:608)
b445) RNH-Val-Pro-Leu-Ser-Xaa₃-Thr-Val-Arg-Xaa₁-Thr-Xaa₂-Ile-Xaa₄-Ile-Ser-Asn-
Gln-[linker]-Leu-Asn-Pro-Glu-Ser-Lys-Ala-Ile-Lys-Asn-Leu-Leu-Lys-(OH)NH₂
(SEQ ID NO:609)
b446) RNH-Val-Pro-Leu-Ser-Arg-Xaa₃-Val-Arg-Xaa₁-Thr-Xaa₂-Ile-Xaa₄-Ile-Ser-Asn-
Gln-[linker]-Leu-Asn-Pro-Glu-Ser-Lys-Ala-Ile-Lys-Asn-Leu-Leu-Lys-(OH)NH₂
(SEQ ID NO:610)
b447) RNH-Val-Pro-Leu-Ser-Arg-Thr-Xaa₃-Arg-Xaa₁-Thr-Xaa₂-Ile-Xaa₄-Ile-Ser-Asn-
Gln-[linker]-Leu-Asn-Pro-Glu-Ser-Lys-Ala-Ile-Lys-Asn-Leu-Leu-Lys-(OH)NH₂
(SEQ ID NO:611)
b448) RNH-Val-Pro-Leu-Ser-Arg-Thr-Val-Xaa₃-Xaa₁-Thr-Xaa₂-Ile-Xaa₄-Ile-Ser-Asn-
Gln-[linker]-Leu-Asn-Pro-Glu-Ser-Lys-Ala-Ile-Lys-Asn-Leu-Leu-Lys-(OH)NH₂
(SEQ ID NO:612)
b449) RNH-Val-Pro-Leu-Ser-Arg-Thr-Val-Arg-Cys-Thr-Cys-Ile-Ser-Xaa₄-Ser-Asn-
Gln-[linker]-Leu-Asn-Pro-Glu-Ser-Lys-Ala-Ile-Lys-Asn-Leu-Leu-Lys-(OH)NH₂
(SEQ ID NO:613)
b450) RNH-Xaa₃-Pro-Leu-Ser-Arg-Thr-Val-Arg-Xaa₁-Thr-Xaa₂-Ile-Ser-Xaa₄-Ser-Asn-
Gln-[linker]-Leu-Asn-Pro-Glu-Ser-Lys-Ala-Ile-Lys-Asn-Leu-Leu-Lys-(OH)NH₂
(SEQ ID NO:614)
b451) RNH-Val-Xaa₃-Leu-Ser-Arg-Thr-Val-Arg-Xaa₁-Thr-Xaa₂-Ile-Ser-Xaa₄-Ser-Asn-
Gln-[linker]-Leu-Asn-Pro-Glu-Ser-Lys-Ala-Ile-Lys-Asn-Leu-Leu-Lys-(OH)NH₂
(SEQ ID NO:615)
b452) RNH-Val-Pro-Xaa₃-Ser-Arg-Thr-Val-Arg-Xaa₁-Thr-Xaa₂-Ile-Ser-Xaa₄-Ser-Asn-
Gln-[linker]-Leu-Asn-Pro-Glu-Ser-Lys-Ala-Ile-Lys-Asn-Leu-Leu-Lys-(OH)NH₂
(SEQ ID NO:616)
b453) RNH-Val-Pro-Leu-Xaa₃-Arg-Thr-Val-Arg-Xaa₁-Thr-Xaa₂-Ile-Ser-Xaa₁-Ser-Asn-
Gln-[linker]-Leu-Asn-Pro-Glu-Ser-Lys-Ala-Ile-Lys-Asn-Leu-Leu-Lys-(OH)NH₂
(SEQ ID NO:617)
b454) RNH-Val-Pro-Leu-Ser-Xaa₃-Thr-Val-Arg-Xaa₁-Thr-Xaa₂-Ile-Ser-Xaa₄-Ser-Asn-
Gln-[linker]-Leu-Asn-Pro-Glu-Ser-Lys-Ala-Ile-Lys-Asn-Leu-Leu-Lys-(OH)NH₂
(SEQ ID NO:618)
b455) RNH-Val-Pro-Leu-Ser-Arg-Xaa₃-Val-Arg-Xaa₁-Thr-Xaa₂-Ile-Ser-Xaa₄-Ser-Asn-
Gln-[linker]-Leu-Asn-Pro-Glu-Ser-Lys-Ala-Ile-Lys-Asn-Leu-Leu-Lys-(OH)NH₂
(SEQ ID NO:619)
b456) RNH-Val-Pro-Leu-Ser-Arg-Thr-Xaa₃-Arg-Xaa₁-Thr-Xaa₂-Ile-Ser-Xaa₄-Ser-Asn-
Gln-[linker]-Leu-Asn-Pro-Glu-Ser-Lys-Ala-Ile-Lys-Asn-Leu-Leu-Lys-(OH)NH₂
(SEQ ID NO:620)
b457) RNH-Val-Pro-Leu-Ser-Arg-Thr-Val-Xaa₃-Xaa₁-Thr-Xaa₂-Ile-Ser-Xaa₄-Ser-Asn-
Gln-[linker]-Leu-Asn-Pro-Glu-Ser-Lys-Ala-Ile-Lys-Asn-Leu-Leu-Lys-(OH)NH₂
(SEQ ID NO:621)
b458) RNH-Val-Pro-Leu-Ser-Arg-Thr-Val-Arg-Cys-Thr-Cys-Ile-Ser-Ile-Ser-Xaa₄-Gln-
[linker]-Leu-Asn-Pro-Glu-Ser-Lys-Ala-Ile-Lys-Asn-Leu-Leu-Lys-(OH)NH₂
(SEQ ID NO:622)
b459) RNH-Xaa₃-Pro-Leu-Ser-Arg-Thr-Val-Arg-Xaa₁-Thr-Xaa₂-Ile-Ser-Ile-Ser-Xaa₄-
Gln-[linker]-Leu-Asn-Pro-Glu-Ser-Lys-Ala-Ile-Lys-Asn-Leu-Leu-Lys-(OH)NH₂
(SEQ ID NO:623)
b460) RNH-Val-Xaa₃-Leu-Ser-Arg-Thr-Val-Arg-Xaa₁-Thr-Xaa₂-Ile-Ser-Ile-Ser-Xaa₄-
Gln-[linker]-Leu-Asn-Pro-Glu-Ser-Lys-Ala-Ile-Lys-Asn-Leu-Leu-Lys-(OH)NH₂
(SEQ ID NO:624)
b461) RNH-Val-Pro-Xaa₃-Ser-Arg-Thr-Val-Arg-Xaa₁-Thr-Xaa₂-Ile-Ser-Ile-Ser-Xaa₄-
Gln-[linker]-Leu-Asn-Pro-Glu-Ser-Lys-Ala-Ile-Lys-Asn-Leu-Leu-Lys-(OH)NH₂
(SEQ ID NO:625)
b462) RNH-Val-Pro-Leu-Xaa₃-Arg-Thr-Val-Arg-Xaa₁-Thr-Xaa₂-Ile-Ser-Ile-Ser-Xaa₄-
Gln-[linker]-Leu-Asn-Pro-Glu-Ser-Lys-Ala-Ile-Lys-Asn-Leu-Leu-Lys-(OH)NH₂
(SEQ ID NO:626)
b463) RNH-Val-Pro-Leu-Ser-Xaa₃-Thr-Val-Arg-Xaa₁-Thr-Xaa₂-Ile-Ser-Ile-Ser-Xaa₄-
Gln-[linker]-Leu-Asn-Pro-Glu-Ser-Lys-Ala-Ile-Lys-Asn-Leu-Leu-Lys-(OH)NH₂
(SEQ ID NO:627)
b464) RNH-Val-Pro-Leu-Ser-Arg-Xaa₃-Val-Arg-Xaa₁-Thr-Xaa₂-Ile-Ser-Ile-Ser-Xaa₄-
Gln-[linker]-Leu-Asn-Pro-Glu-Ser-Lys-Ala-Ile-Lys-Asn-Leu-Leu-Lys-(OH)NH₂
(SEQ ID NO:628)
b465) RNH-Val-Pro-Leu-Ser-Arg-Thr-Xaa₃-Arg-Xaa₁-Thr-Xaa₂-Ile-Ser-Ile-Ser-Xaa₄-
Gln-[linker]-Leu-Asn-Pro-Glu-Ser-Lys-Ala-Ile-Lys-Asn-Leu-Leu-Lys-(OH)NH₂
(SEQ ID NO:629)
b466) RNH-Val-Pro-Leu-Ser-Arg-Thr-Val-Xaa₃-Xaa₁-Thr-Xaa₂-Ile-Ser-Ile-Ser-Xaa₄-
Gln-[linker]-Leu-Asn-Pro-Glu-Ser-Lys-Ala-Ile-Lys-Asn-Leu-Leu-Lys-(OH)NH₂
(SEQ ID NO:630)
b467) RNH-Val-Pro-Leu-Ser-Arg-Thr-Val-Arg-Cys-Thr-Cys-Ile-Ser-Ile-Ser-Gln-
Xaa₄-[linker]-Leu-Asn-Pro-Glu-Ser-Lys-Ala-Ile-Lys-Asn-Leu-Leu-Lys-(OH)NH₂
(SEQ ID NO:631)
b468) RNH-Xaa₃-Pro-Leu-Ser-Arg-Thr-Val-Arg-Xaa₁-Thr-Xaa₂-Ile-Ser-Ile-Ser-Gln-
Xaa₄-[linker]-Leu-Asn-Pro-Glu-Ser-Lys-Ala-Ile-Lys-Asn-Leu-Leu-Lys-(OH)NH₂
(SEQ ID NO:632)
b469) RNH-Val-Xaa₃-Leu-Ser-Arg-Thr-Val-Arg-Xaa₁-Thr-Xaa₂-Ile-Ser-Ile-Ser-
GlnXaa₄-[linker]-Leu-Asn-Pro-Glu-Ser-Lys-Ala-Ile-Lys-Asn-Leu-Leu-Lys-(OH)NH₂
(SEQ ID NO:633)
b470) RNH-Val-Pro-Xaa₃-Ser-Arg-Thr-Val-Arg-Xaa₁-Thr-Xaa₂-Ile-Ser-Ile-Ser-
GlnXaa₄-[linker]-Leu-Asn-Pro-Glu-Ser-Lys-Ala-Ile-Lys-Asn-Leu-Leu-Lys-(OH)NH₂
(SEQ ID NO:634)
b471) RNH-Val-Pro-Leu-Xaa₃-Arg-Thr-Val-Arg-Xaa₁-Thr-Xaa₂-Ile-Ser-Ile-Ser-
GlnXaa₄-[linker]-Leu-Asn-Pro-Glu-Ser-Lys-Ala-Ile-Lys-Asn-Leu-Leu-Lys-(OH)NH₂
(SEQ ID NO:635)
b472) RNH-Val-Pro-Leu-Ser-Xaa₃-Thr-Val-Arg-Xaa₁-Thr-Xaa₂-Ile-Ser-Ile-Ser-
GlnXaa₄-[linker]-Leu-Asn-Pro-Glu-Ser-Lys-Ala-Ile-Lys-Asn-Leu-Leu-Lys-(OH)NH₂
(SEQ ID NO:636)
b473) RNH-Val-Pro-Leu-Ser-Arg-Xaa₃-Val-Arg-Xaa₁-Thr-Xaa₂-Ile-Ser-Ile-Ser-Gln-
Xaa₄-[linker]-Leu-Asn-Pro-Glu-Ser-Lys-Ala-Ile-Lys-Asn-Leu-Leu-Lys-(OH)NH₂
(SEQ ID NO:637)
b474) RNH-Val-Pro-Leu-Ser-Arg-Thr-Xaa₃-Arg-Xaa₁-Thr-Xaa₂-Ile-Ser-Ile-Ser-Gln-
Xaa₄-[linker]-Leu-Asn-Pro-Glu-Ser-Lys-Ala-Ile-Lys-Asn-Leu-Leu-Lys-(OH)NH₂
(SEQ ID NO:638)
b475) RNH-Val-Pro-Leu-Ser-Arg-Thr-Val-Xaa₃-Xaa₁-Thr-Xaa₂-Ile-Ser-Ile-Ser-Gln-
Xaa₄-[linker]-Leu-Asn-Pro-Glu-Ser-Lys-Ala-Ile-Lys-Asn-Leu-Leu-Lys-(OH)NH₂

[0128] In some embodiments IP-10 analogs were cyclized by etherification between Lys66 and Ser69 (underlined residues are cyclized).

IP-10-(1-17)-[linker]-IP-10-(59-71)-cyclic(Lys66-Ser69) acid or amide
(SEQ ID NO:639)
b476) RNH-Val-Pro-Leu-Ser-Arg-Thr-Val-Arg-Cys-Thr-Cys-Ile-Ser-Ile-[linker]-Lys-
Ala-Ile-Lys-Asn-Leu-Leu-Lys-Ala-Val-Ser-Lys-Glu-(OH)NH₂
(SEQ ID NO:640)
b477) RNH-Xaa₃-Pro-Leu-Ser-Arg-Thr-Val-Arg-Xaa₁-Thr-Xaa₂-Ile-Ser-Ile-[linker]-
Lys-Ala-Ile-Lys-Asn-Leu-Leu-Lys-Ala-Val-Ser-Lys-Glu-(OH)NH₂
(SEQ ID NO:641)
b478) RNH-Val-Xaa₃-Leu-Ser-Arg-Thr-Val-Arg-Xaa₁-Thr-Xaa₂-Ile-Ser-Ile-[linker]-
Lys-Ala-Ile-Lys-Asn-Leu-Leu-Lys-Ala-Val-Ser-Lys-Glu-(OH)NH₂
(SEQ ID NO:642)
b479) RNH-Val-Pro-Xaa₃-Ser-Arg-Thr-Val-Arg-Xaa₁-Thr-Xaa₂-Ile-Ser-Ile-[linker]-
Lys-Ala-Ile-Lys-Asn-Leu-Leu-Lys-Ala-Val-Ser-Lys-Glu-(OH)NH₂
(SEQ ID NO:643)
b480) RNH-Val-Pro-Leu-Xaa₃-Arg-Thr-Val-Arg-Xaa₁-Thr-Xaa₂-Ile-Ser-Ile-[linker]-
Lys-Ala-Ile-Lys-Asn-Leu-Leu-Lys-Ala-Val-Ser-Lys-Glu-(OH)NH₂
(SEQ ID NO:644)
b481) RNH-Val-Pro-Leu-Ser-Xaa₃-Thr-Val-Arg-Xaa₁-Thr-Xaa₂-Ile-Ser-Ile-[linker]-
Lys-Ala-Ile-Lys-Asn-Leu-Leu-Lys-Ala-Val-Ser-Lys-Glu-(OH)NH₂
(SEQ ID NO:645)
b482) RNH-Val-Pro-Leu-Ser-Arg-Xaa₃-Val-Arg-Xaa₁-Thr-Xaa₂-Ile-Ser-Ile-[linker]-
Lys-Ala-Ile-Lys-Asn-Leu-Leu-Lys-Ala-Val-Ser-Lys-Glu-(OH)NH₂
(SEQ ID NO:646)
b483) RNH-Val-Pro-Leu-Ser-Arg-Thr-Xaa₃-Arg-Xaa₁-Thr-Xaa₂-Ile-Ser-Ile-[linker]-
Lys-Ala-Ile-Lys-Asn-Leu-Leu-Lys-Ala-Val-Ser-Lys-Glu-(OH)NH₂
(SEQ ID NO:647)
b484) RNH-Val-Pro-Leu-Ser-Arg-Thr-Val-Xaa₃-Xaa₁-Thr-Xaa₂-Ile-Ser-Ile-[linker]-
Lys-Ala-Ile-Lys-Asn-Leu-Leu-Lys-Ala-Val-Ser-Lys-Glu-(OH)NH₂
(SEQ ID NO:648)
b485) RNK-Val-Pro-Leu-Ser-Arg-Thr-Val-Arg-Cys-Thr-Cys-Xaa₄-Ser-Ile-[linker]-
Lys-Ala-Ile-Lys-Asn-Leu-Leu-Lys-Ala-Val-Ser-Lys-Glu-(OH)NH₂
(SEQ ID NO:649)
b486) RNH-Xaa₃-Pro-Leu-Ser-Arg-Thr-Val-Arg-Xaa₁-Thr-Xaa₂-Xaa₄-Ser-Ile-[linker]-
Lys-Ala-Ile-Lys-Asn-Leu-Leu-Lys-Ala-Val-Ser-Lys-Glu-(OH)NH₂
(SEQ ID NO:650)
b487) RNH-Val-Xaa₃-Leu-Ser-Arg-Thr-Val-Arg-Xaa₁-Thr-Xaa₂-Xaa₄-Ser-Ile-[linker]-
Lys-Ala-Ile-Lys-Asn-Leu-Leu-Lys-Ala-Val-Ser-Lys-Glu-(OH)NH₂
(SEQ ID NO:651)
b488) RNH-Val-Pro-Xaa₃-Ser-Arg-Thr-Val-Arg-Xaa₁-Thr-Xaa₂-Xaa₁-Ser-Ile-[linker]-
Lys-Ala-Ile-Lys-Asn-Leu-Leu-Lys-Ala-Val-Ser-Lys-Glu-(OH)NH₂
(SEQ ID NO:652)
b489) RNH-Val-Pro-Leu-Xaa₃-Arg-Thr-Val-Arg-Xaa₁-Thr-Xaa₂-Xaa₄-Ser-Ile-[linker]-
Lys-Ala-Ile-Lys-Asn-Leu-Leu-Lys-Ala-Val-Ser-Lys-Glu-(OH)NH₂
(SEQ ID NO:653)
b490) RNH-Val-Pro-Leu-Ser-Xaa₃-Thr-Val-Arg-Xaa₁-Thr-Xaa₂-Xaa₄-Ser-Ile-[linker]-
Lys-Ala-Ile-Lys-Asn-Leu-Leu-Lys-Ala-Val-Ser-Lys-Glu-(OH)NH₂
(SEQ ID NO:654)
b491) RNH-Val-Pro-Leu-Ser-Arg-Xaa₃-Val-Arg-Xaa₁-Thr-Xaa₂-Xaa₄-Ser-Ile-[linker]-
Lys-Ala-Ile-Lys-Asn-Leu-Leu-Lys-Ala-Val-Ser-Lys-Glu-(OH)NH₂
(SEQ ID NO:655)
b492) RNH-Val-Pro-Leu-Ser-Arg-Thr-Xaa₃-Arg-Xaa₁-Thr-Xaa₂-Xaa₄-Ser-Ile-[linker]-
Lys-Ala-Ile-Lys-Asn-Leu-Leu-Lys-Ala-Val-Ser-Lys-Glu-(OH)NH₂
(SEQ ID NO:656)
b493) RNH-Val-Pro-Leu-Ser-Arg-Thr-Val-Xaa₃-Xaa₁-Thr-Xaa₂-Xaa₄-Ser-Ile-[linker]-
Lys-Ala-Ile-Lys-Asn-Leu-Leu-Lys-Ala-Val-Ser-Lys-Glu-(OH)NH₂
(SEQ ID NO:657)
b494) RNH-Val-Pro-Leu-Ser-Arg-Thr-Val-Arg-Cys-Thr-Cys-Ile-Xaa₄-Ile-[linker]-
Lys-Ala-Ile-Lys-Asn-Leu-Leu-Lys-Ala-Val-Ser-Lys-Glu-(OH)NH₂
(SEQ ID NO:658)
b495) RNH-Xaa₃-Pro-Leu-Ser-Arg-Thr-Val-Arg-Xaa₁-Thr-Xaa₂-Ile-Xaa₄-Ile-[linker]-
Lys-Ala-Ile-Lys-Asn-Leu-Leu-Lys-Ala-Val-Ser-Lys-Glu-(OH)NH₂
(SEQ ID NO:659)
b496) RNH-Val-Xaa₃-Leu-Ser-Arg-Thr-Val-Arg-Xaa₁-Thr-Xaa₂-Ile-Xaa₄-Ile-[linker]-
Lys-Ala-Ile-Lys-Asn-Leu-Leu-Lys-Ala-Val-Ser-Lys-Glu-(OH)NH₂
(SEQ ID NO:660)
b497) RNH-Val-Pro-Xaa₃-Ser-Arg-Thr-Val-Arg-Xaa₁-Thr-Xaa₂-Ile-Xaa₄-Ile-[linker]-
Lys-Ala-Ile-Lys-Asn-Leu-Leu-Lys-Ala-Val-Ser-Lys-Glu-(OH)NH₂
(SEQ ID NO:661)
b498) RNH-Val-Pro-Leu-Xaa₃-Arg-Thr-Val-Arg-Xaa₁-Thr-Xaa₂-Ile-Xaa₄-Ile-[linker]-
Lys-Ala-Ile-Lys-Asn-Leu-Leu-Lys-Ala-Val-Ser-Lys-Glu-(OH)NH₂
(SEQ ID NO:662)
b499) RNH-Val-Pro-Leu-Ser-Xaa₃-Thr-Val-Arg-Xaa₁-Thr-Xaa₂-Ile-Xaa₄-Ile-[linker]-
Lys-Ala-Ile-Lys-Asn-Leu-Leu-Lys-Ala-Val-Ser-Lys-Glu-(OH)NH₂
(SEQ ID NO:663)
b500) RNH-Val-Pro-Leu-Ser-Arg-Xaa₃-Val-Arg-Xaa₁-Thr-Xaa₂-Ile-Xaa₄-Ile-[linker]-
Lys-Ala-Ile-Lys-Asn-Leu-Leu-Lys-Ala-Val-Ser-Lys-Glu-(OH)NH₂
(SEQ ID NO:664)
b501) RNH-Val-Pro-Leu-Ser-Arg-Thr-Xaa₃-Arg-Xaa₁-Thr-Xaa₂-Ile-Xaa₁-Ile-[linker]-
Lys-Ala-Ile-Lys-Asn-Leu-Leu-Lys-Ala-Val-Ser-Lys-Glu-(OH)NH₂
(SEQ ID NO:665)
b502) RNH-Val-Pro-Leu-Ser-Arg-Thr-Val-Xaa₃-Xaa₁-Thr-Xaa₂-Ile-Xaa₄-Ile-[linker]-
Lys-Ala-Ile-Lys-Asn-Leu-Leu-Lys-Ala-Val-Ser-Lys-Glu-(OH)NH₂
(SEQ ID NO:666)
b503) RNH-Val-Pro-Leu-Ser-Arg-Thr-Val-Arg-Cys-Thr-Cys-Ile-Ser-Xaa₄-[linker]-
Lys-Ala-Ile-Lys-Asn-Leu-Leu-Lys-Ala-Val-Ser-Lys-Glu-(OH)NH₂
(SEQ ID NO:667)
b504) RNH-Xaa₃-Pro-Leu-Ser-Arg-Thr-Val-Arg-Xaa₁-Thr-Xaa₂-Ile-Ser-Xaa₄-[linker]-
Lys-Ala-Ile-Lys-Asn-Leu-Leu-Lys-Ala-Val-Ser-Lys-Glu-(OH)NH₂
(SEQ ID NO:668)
b505) RNH-Val-Xaa₃-Leu-Ser-Arg-Thr-Val-Arg-Xaa₁-Thr-Xaa₂-Ile-Ser-Xaa₄-[linker]-
Lys-Ala-Ile-Lys-Asn-Leu-Leu-Lys-Ala-Val-Ser-Lys-Glu-(OH)NH₂
(SEQ ID NO:669)
b506) RNH-Val-Pro-Xaa₃-Ser-Arg-Thr-Val-Arg-Xaa₁-Thr-Xaa₂-Ile-Ser-Xaa₄-[linker]-
Lys-Ala-Ile-Lys-Asn-Leu-Leu-Lys-Ala-Val-Ser-Lys-Glu-(OH)NH₂
(SEQ ID NO:670)
b507) RNH-Val-Pro-Leu-Xaa₃-Arg-Thr-Val-Arg-Xaa₁-Thr-Xaa₂-Ile-Ser-Xaa₄-[linker]-
Lys-Ala-Ile-Lys-Asn-Leu-Leu-Lys-Ala-Val-Ser-Lys-Glu-(OH)NH₂
(SEQ ID NO:671)
b508) RNH-Val-Pro-Leu-Ser-Xaa₃-Thr-Val-Arg-Xaa₁-Thr-Xaa₂-Ile-Ser-Xaa₄-[linker]-
Lys-Ala-Ile-Lys-Asn-Le1u-Leu-Lys-Ala-Val-Ser-Lys-Glu-(OH)NH2
(SEQ ID NO:672)
b509) RNH-Val-Pro-Leu-Ser-Arg-Xaa₃-Val-Arg-Xaa₁-Thr-Xaa₂-Ile-Ser-Xaa₄-[linker]-
Lys-Ala-Ile-Lys-Asn-Leu-Leu-Lys-Ala-Val-Ser-Lys-Glu-(OH)NH₂
(SEQ ID NO:673)
b510) RNH-Val-Pro-Leu-Ser-Arg-Thr-Xaa₃-Arg-Xaa₁-Thr-Xaa₂-Ile-Ser-Xaa₄-[linker]-
Lys-Ala-Ile-Lys-Asn-Leu-Leu-Lys-Ala-Val-Ser-Lys-Glu-(OH)NH₂
(SEQ ID NO:674)
b511) RNH-Val-Pro-Leu-Ser-Arg-Thr-Val-Xaa₃-Xaa₁-Thr-Xaa₂-Ile-Ser-Xaa₄-[linker]-
Lys-Ala-Ile-Lys-Asn-Leu-Leu-Lys-Ala-Val-Ser-Lys-Glu-(OH)NH₂
IP-10-(1-17)-[linker]-IP-10-(59-71)-cyclic(Lys66-Ser69) acid or amide
(SEQ ID NO:675)
b512) RNH-Val-Pro-Leu-Ser-Arg-Thr-Val-Arg-Cys-Thr-Cys-Ile-Ser-Ile-Ser-Asn-Gln-
[linker]-Lys-Ala-Ile-Lys-Asn-Leu-Leu-Lys-Ala-Val-Ser-Lys-Glu-(OH)NH₂
(SEQ ID NO:676)
b513) RNH-Xaa₃-Pro-Leu-Ser-Arg-Thr-Val-Arg-Xaa₁-Thr-Xaa₂-Ile-Ser-Ile-Ser-Asn-
Gln-[linker]-Lys-Ala-Ile-Lys-Asn-Leu-Leu-Lys-Ala-Val-Ser-Lys-Glu-(OH)NH₂
(SEQ ID NO:677)
b514) RNH-Val-Xaa₃-Leu-Ser-Arg-Thr-Val-Arg-Xaa₁-Thr-Xaa₂-Ile-Ser-Ile-Ser-Asn-
Gln-[linker]-Lys-Ala-Ile-Lys-Asn-Leu-Leu-Lys-Ala-Val-Ser-Lys-Glu-(OH)NH₂
(SEQ ID NO:678)
b515) RNH-Val-Pro-Xaa₃-Ser-Arg-Thr-Val-Arg-Xaa₁-Thr-Xaa₂-Ile-Ser-Ile-Ser-Asn-
Gln-[linker]-Lys-Ala-Ile-Lys-Asn-Leu-Leu-Lys-Ala-Val-Ser-Lys-Glu-(OH)NH₂
(SEQ ID NO:679)
b516) RNH-Val-Pro-Leu-Xaa₃-Arg-Thr-Val-Arg-Xaa₁-Thr-Xaa₂-Ile-Ser-Ile-Ser-Asn-
Gln-[linker]-Lys-Ala-Ile-Lys-Asn-Leu-Leu-Lys-Ala-Val-Ser-Lys-Glu-(OH)NH₂
(SEQ ID NO:680)
b517) RNH-Val-Pro-Leu-Ser-Xaa₃-Thr-Val-Arg-Xaa₁-Thr-Xaa₂-Ile-Ser-Ile-Ser-Asn-
Gln-[linker]-Lys-Ala-Ile-Lys-Asn-Leu-Leu-Lys-Ala-Val-Ser-Lys-Glu-(OH)NH₂
(SEQ ID NO:681)
b518) RNH-Val-Pro-Leu-Ser-Arg-Xaa₃-Val-Arg-Xaa₁-Thr-Xaa₂-Ile-Ser-Ile-Ser-Asn-
Gln-[linker]-Lys-Ala-Ile-Lys-Asn-Leu-Leu-Lys-Ala-Val-Ser-Lys-Glu-(OH)NH₂
(SEQ ID NO:682)
b519) RNH-Val-Pro-Leu-Ser-Arg-Thr-Xaa₃-Arg-Xaa₁-Thr-Xaa₂-Ile-Ser-Ile-Ser-Asn-
Gln-[linker]-Lys-Ala-Ile-Lys-Asn-Leu-Leu-Lys-Ala-Val-Ser-Lys-Glu-(OH)NH₂
(SEQ ID NO:683)
b520) RNH-Val-Pro-Leu-Ser-Arg-Thr-Val-Xaa₃-Xaa₁-Thr-Xaa₂-Ile-Ser-Ile-Ser-Asn-
Gln-[linker]-Lys-Ala-Ile-Lys-Asn-Leu-Leu-Lys-Ala-Val-Ser-Lys-Glu-(OH)NH₂
(SEQ ID NO:684)
b521) RNH-Val-Pro-Leu-Ser-Arg-Thr-Val-Arg-Cys-Thr-Cys-Xaa₄-Ser-Ile-Ser-Asn-
Gln-[linker]-Lys-Ala-Ile-Lys-Asn-Leu-Leu-Lys-Ala-Val-Ser-Lys-Glu-(OH)NH₂
(SEQ ID NO:685)
b522) RNH-Xaa₃-Pro-Leu-Ser-Arg-Thr-Val-Arg-Xaa₁-Thr-Xaa₂-Xaa₄-Ser-Ile-Ser-Asn-
Gln-[linker]-Lys-Ala-Ile-Lys-Asn-Leu-Leu-Lys-Ala-Val-Ser-Lys-Glu-(OH)NH₂
(SEQ ID NO:686)
b523) RNH-Val-Xaa₃-Leu-Ser-Arg-Thr-Val-Arg-Xaa₁-Thr-Xaa₂-Xaa₄-Ser-Ile-Ser-Asn-
Gln-[linker]-Lys-Ala-Ile-Lys-Asn-Leu-Leu-Lys-Ala-Val-Ser-Lys-Glu-(OH)NH₂
(SEQ ID NO:687)
b524) RNH-Val-Pro-Xaa₃-Ser-Arg-Thr-Val-Arg-Xaa₁-Thr-Xaa₂-Xaa₁-Ser-Ile-Ser-Asn-
Gln-[linker]-Lys-Ala-Ile-Lys-Asn-Leu-Leu-Lys-Ala-Val-Ser-Lys-Glu-(OH)NH₂
(SEQ ID NO:688)
b525) RNH-Val-Pro-Leu-Xaa₃-Arg-Thr-Val-Arg-Xaa₁-Thr-Xaa₂-Xaa₄-Ser-Ile-Ser-Asn-
Gln-[linker]-Lys-Ala-Ile-Lys-Asn-Leu-Leu-Lys-Ala-Val-Ser-Lys-Glu-(OH)NH₂
(SEQ ID NO:689)
b526) RNH-Val-Pro-Leu-Ser-Xaa₃-Thr-Val-Arg-Xaa₁-Thr-Xaa₂-Xaa₄-Ser-Ile-Ser-Asn-
Gln-[linker]-Lys-Ala-Ile-Lys-Asn-Leu-Leu-Lys-Ala-Val-Ser-Lys-Glu-(OH)NH₂
(SEQ ID NO:690)
b527) RNH-Val-Pro-Leu-Ser-Arg-Xaa₃-Val-Arg-Xaa₁-Thr-Xaa₂-Xaa₄-Ser-Ile-Ser-Asn-
Gln-[linker]-Lys-Ala-Ile-Lys-Asn-Leu-Leu-Lys-Ala-Val-Ser-Lys-Glu-(OH)NH₂
(SEQ ID NO:691)
b528) RNH-Val-Pro-Leu-Ser-Arg-Thr-Xaa₃-Arg-Xaa₁-Thr-Xaa₂-Xaa₄-Ser-Ile-Ser-Asn-
Gln-[linker]-Lys-Ala-Ile-Lys-Asn-Leu-Leu-Lys-Ala-Val-Ser-Lys-Glu-(OH)NH₂
(SEQ ID NO:692)
b529) RNH-Val-Pro-Leu-Ser-Arg-Thr-Val-Xaa₃-Xaa₁-Thr-Xaa₂-Xaa₄-Ser-Ile-Ser-Asn-
Gln-[linker]-Lys-Ala-Ile-Lys-Asn-Leu-Leu-Lys-Ala-Val-Ser-Lys-Glu-(OH)NH₂
(SEQ ID NO:693)
b530) RNH-Val-Pro-Leu-Ser-Arg-Thr-Val-Arg-Cys-Thr-Cys-Ile-Xaa₄-Ile-Ser-Asn-
Gln-[linker]-Lys-Ala-Ile-Lys-Asn-Leu-Leu-Lys-Ala-Val-Ser-Lys-Glu-(OH)NH₂
(SEQ ID NO:694)
b531) RNH-Xaa₃-Pro-Leu-Ser-Arg-Thr-Val-Arg-Xaa₁-Thr-Xaa₂-Ile-Xaa₄-Ile-Ser-Asn-
Gln-[linker]-Lys-Ala-Ile-Lys-Asn-Leu-Leu-Lys-Ala-Val-Ser-Lys-Glu-(OH)NH₂
(SEQ ID NO:695)
b532) RNH-Val-Xaa₃-Leu-Ser-Arg-Thr-Val-Arg-Xaa₁-Thr-Xaa₂-Ile-Xaa₄-Ile-Ser-Asn-
Gln-[linker]-Lys-Ala-Ile-Lys-Asn-Leu-Leu-Lys-Ala-Val-Ser-Lys-Glu-(OH)NH₂
(SEQ ID NO:696)
b533) RNH-Val-Pro-Xaa₃-Ser-Arg-Thr-Val-Arg-Xaa₁-Thr-Xaa₂-Ile-Xaa₄-Ile-Ser-Asn-
Gln-[linker]-Lys-Ala-Ile-Lys-Asn-Leu-Leu-Lys-Ala-Val-Ser-Lys-Glu-(OH)NH₂
(SEQ ID NO:697)
b534) RNH-Val-Pro-Leu-Xaa₃-Arg-Thr-Val-Arg-Xaa₁-Thr-Xaa₂-Ile-Xaa₄-Ile-Ser-Asn-
Gln-[linker]-Lys-Ala-Ile-Lys-Asn-Leu-Leu-Lys-Ala-Val-Ser-Lys-Glu-(OH)NH₂
(SEQ ID NO:698)
b535) RNH-Val-Pro-Leu-Ser-Xaa₃-Thr-Val-Arg-Xaa₁-Thr-Xaa₂-Ile-Xaa₄-Ile-Ser-Asn-
Gln-[linker]-Lys-Ala-Ile-Lys-Asn-Leu-Leu-Lys-Ala-Val-Ser-Lys-Glu-(OH)NH₂
(SEQ ID NO:699)
b536) RNH-Val-Pro-Leu-Ser-Arg-Xaa₃-Val-Arg-Xaa₁-Thr-Xaa₂-Ile-Xaa₄-Ile-Ser-Asn-
Gln-[linker]-Lys-Ala-Ile-Lys-Asn-Leu-Leu-Lys-Ala-Val-Ser-Lys-Glu-(OH)NH₂
(SEQ ID NO:700)
b537) RNH-Val-Pro-Leu-Ser-Arg-Thr-Xaa₃-Arg-Xaa₁-Thr-Xaa₂-Ile-Xaa₄-Ile-Ser-Asn-
Gln-[linker]-Lys-Ala-Ile-Lys-Asn-Leu-Leu-Lys-Ala-Val-Ser-Lys-Glu-(OH)NH₂
(SEQ ID NO:701)
b538) RNH-Val-Pro-Leu-Ser-Arg-Thr-Val-Xaa₃-Xaa₁-Thr-Xaa₂-Ile-Xaa₄-Ile-Ser-Asn-
Gln-[linker]-Lys-Ala-Ile-Lys-Asn-Leu-Leu-Lys-Ala-Val-Ser-Lys-Glu-(OH)NH₂
(SEQ ID NO:702)
b539) RNH-Val-Pro-Leu-Ser-Arg-Thr-Val-Arg-Cys-Thr-Cys-Ile-Ser-Xaa₄-Ser-Asn-
Gln-[linker]-Lys-Ala-Ile-Lys-Asn-Leu-Leu-Lys-Ala-Val-Ser-Lys-Glu-(OH)NH₂
(SEQ ID NO:703)
b540) RNH-Xaa₃-Pro-Leu-Ser-Arg-Thr-Val-Arg-Xaa₁-Thr-Xaa₂-Ile-Ser-Xaa₄-Ser-Asn-
Gln-[linker]-Lys-Ala-Ile-Lys-Asn-Leu-Leu-Lys-Ala-Val-Ser-Lys-Glu-(OH)NH₂
(SEQ ID NO:704)
b541) RNH-Val-Xaa₃-Leu-Ser-Arg-Thr-Val-Arg-Xaa₁-Thr-Xaa₂-Ile-Ser-Xaa₄-Ser-Asn-
Gln-[linker]-Lys-Ala-Ile-Lys-Asn-Leu-Leu-Lys-Ala-Val-Ser-Lys-Glu-(OH)NH₂
(SEQ ID NO:705)
b542) RNH-Val-Pro-Xaa₃-Ser-Arg-Thr-Val-Arg-Xaa₁-Thr-Xaa₂-Ile-Ser-Xaa₄-Ser-Asn-
Gln-[linker]-Lys-Ala-Ile-Lys-Asn-Leu-Leu-Lys-Ala-Val-Ser-Lys-Glu-(OH)NH₂
(SEQ ID NO:706)
b543) RNH-Val-Pro-Leu-Xaa₃-Arg-Thr-Val-Arg-Xaa₁-Thr-Xaa₂-Ile-Ser-Xaa₄-Ser-Asn-
Gln-[linker]-Lys-Ala-Ile-Lys-Asn-Leu-Leu-Lys-Ala-Val-Ser-Lys-Glu-(OH)NH₂
(SEQ ID NO:707)
b544) RNH-Val-Pro-Leu-Ser-Xaa₃-Thr-Val-Arg-Xaa₁-Thr-Xaa₂-Ile-Ser-Xaa₄-Ser-Asn-
Gln-[linker]-Lys-Ala-Ile-Lys-Asn-Leu-Leu-Lys-Ala-Val-Ser-Lys-Glu-(OH)NH₂
(SEQ ID NO:708)
b545) RNH-Val-Pro-Leu-Ser-Arg-Xaa₃-Val-Arg-Xaa₁-Thr-Xaa₂-Ile-Ser-Xaa₄-Ser-Asn-
Gln-[linker]-Lys-Ala-Ile-Lys-Asn-Leu-Leu-Lys-Ala-Val-Ser-Lys-Glu-(OH)NH₂
(SEQ ID NO:709)
b546) RNH-Val-Pro-Leu-Ser-Arg-Thr-Xaa₃-Arg-Xaa₁-Thr-Xaa₂-Ile-Ser-Xaa₄-Ser-Asn-
Gln-[linker]-Lys-Ala-Ile-Lys-Asn-Leu-Leu-Lys-Ala-Val-Ser-Lys-Glu-(OH)NH₂
(SEQ ID NO:710)
b548) RNH-Val-Pro-Leu-Ser-Arg-Thr-Val-Xaa₃-Xaa₁-Thr-Xaa₂-Ile-Ser-Xaa₄-Ser-Asn-
Gln-[linker]-Lys-Ala-Ile-Lys-Asn-Leu-Leu-Lys-Ala-Val-Ser-Lys-Glu-(OH)NH₂
(SEQ ID NO:711)
b549) RNH-Val-Pro-Leu-Ser-Arg-Thr-Val-Arg-Cys-Thr-Cys-Ile-Ser-Ile-Ser-Xaa₄-Gln-
[linker]-Lys-Ala-Ile-Lys-Asn-Leu-Leu-Lys-Ala-Val-Ser-Lys-Glu-(OH)NH₂
(SEQ ID NO:712)
b550) RNH-Xaa₃-Pro-Leu-Ser-Arg-Thr-Val-Arg-Xaa₁-Thr-Xaa₂-Ile-Ser-Ile-Ser-Xaa₄-
Gln-[linker]-Lys-Ala-Ile-Lys-Asn-Leu-Leu-Lys-Ala-Val-Ser-Lys-Glu-(OH)NH₂
(SEQ ID NO:713)
b551) RNH-Val-Xaa₃-Leu-Ser-Arg-Thr-Val-Arg-Xaa₁-Thr-Xaa₂-Ile-Ser-Ile-Ser-Xaa₄-
Gln-[linker]-Lys-Ala-Ile-Lys-Asn-Leu-Leu-Lys-Ala-Val-Ser-Lys-Glu-(OH)NH₂
(SEQ ID NO:714)
b552) RNH-Val-Pro-Xaa₃-Ser-Arg-Thr-Val-Arg-Xaa₁-Thr-Xaa₂-Ile-Ser-Ile-Ser-Xaa₄-
Gln-[linker]-Lys-Ala-Ile-Lys-Asn-Leu-Leu-Lys-Ala-Val-Ser-Lys-Glu-(OH)NH₂
(SEQ ID NO:715)
b553) RNH-Val-Pro-Leu-Xaa₃-Arg-Thr-Val-Arg-Xaa₁-Thr-Xaa₂-Ile-Ser-Ile-Ser-Xaa₄-
Gln-[linker]-Lys-Ala-Ile-Lys-Asn-Leu-Leu-Lys-Ala-Val-Ser-Lys-Glu-(OH)NH₂
(SEQ ID NO:716)
b554) RNH-Val-Pro-Leu-Ser-Xaa₃-Thr-Val-Arg-Xaa₁-Thr-Xaa₂-Ile-Ser-Ile-Ser-Xaa₄-
Gln-[linker]-Lys-Ala-Ile-Lys-Asn-Leu-Leu-Lys-Ala-Val-Ser-Lys-Glu-(OH)NH₂
(SEQ ID NO:717)
b555) RNH-Val-Pro-Leu-Ser-Arg-Xaa₃-Val-Arg-Xaa₁-Thr-Xaa₂-Ile-Ser-Ile-Ser-Xaa₄-
Gln-[linker]-Lys-Ala-Ile-Lys-Asn-Leu-Leu-Lys-Ala-Val-Ser-Lys-Glu-(OH)NH₂
(SEQ ID NO:718)
b556) RNH-Val-Pro-Leu-Ser-Arg-Thr-Xaa₃-Arg-Xaa₁-Thr-Xaa₂-Ile-Ser-Ile-Ser-Xaa₄-
Gln-[linker]-Lys-Ala-Ile-Lys-Asn-Leu-Leu-Lys-Ala-Val-Ser-Lys-Glu-(OH)NH₂
(SEQ ID NO:719)
b557) RNH-Val-Pro-Leu-Ser-Arg-Thr-Val-Xaa₃-Xaa₁-Thr-Xaa₂-Ile-Ser-Ile-Ser-Xaa₄-
Gln-[linker]-Lys-Ala-Ile-Lys-Asn-Leu-Leu-Lys-Ala-Val-Ser-Lys-Glu-(OH)NH₂
(SEQ ID NO:720)
b558) RNH-Val-Pro-Leu-Ser-Arg-Thr-Val-Arg-Cys-Thr-Cys-Ile-Ser-Ile-Ser-Gln-Xaa₄-
[linker]-Lys-Ala-Ile-Lys-Asn-Leu-Leu-Lys-Ala-Val-Ser-Lys-Glu-(OH)NH₂
(SEQ ID NO:721)
b559) RNH-Xaa₃-Pro-Leu-Ser-Arg-Thr-Val-Arg-Xaa₁-Thr-Xaa₂-Ile-Ser-Ile-Ser-Gln-
Xaa₄-[linker]-Lys-Ala-Ile-Lys-Asn-Leu-Leu-Lys-Ala-Val-Ser-Lys-Glu-(OH)NH₂
(SEQ ID NO:722)
b560) RNH-Val-Xaa₃-Leu-Ser-Arg-Thr-Val-Arg-Xaa₁-Thr-Xaa₂-Ile-Ser-Ile-Ser-
GlnXaa₄[linker]-Lys-Ala-Ile-Lys-Asn-Leu-Leu-Lys-Ala-Val-Ser-Lys-Glu-(OH)NH₂
(SEQ ID NO:723)
b561) RNH-Val-Pro-Xaa₃-Ser-Arg-Thr-Val-Arg-Xaa₁-Thr-Xaa₂-Ile-Ser-Ile-Ser-
GlnXaa₄[linker]-Lys-Ala-Ile-Lys-Asn-Leu-Leu-Lys-Ala-Val-Ser-Lys-Glu-(OH)NH₂
(SEQ ID NO:724)
b562) RNH-Val-Pro-Leu-Xaa₃-Arg-Thr-Val-Arg-Xaa₁-Thr-Xaa₂-Ile-Ser-Ile-Ser-
GlnXaa₄[linker]-Lys-Ala-Ile-Lys-Asn-Leu-Leu-Lys-Ala-Val-Ser-Lys-Glu-(OH)NH₂
(SEQ ID NO:725)
b563) RNH-Val-Pro-Leu-Ser-Xaa₃-Thr-Val-Arg-Xaa₁-Thr-Xaa₂-Ile-Ser-Ile-Ser-
GlnXaa₄[linker]-Lys-Ala-Ile-Lys-Asn-Leu-Leu-Lys-Ala-Val-Ser-Lys-Glu-(OH)NH₂
(SEQ ID NO:726)
b564) RNH-Val-Pro-Leu-Ser-Arg-Xaa₃-Val-Arg-Xaa₁-Thr-Xaa₂-Ile-Ser-Ile-Ser-Gln-
GlnXaa₄[linker]-Lys-Ala-Ile-Lys-Asn-Leu-Leu-Lys-Ala-Val-Ser-Lys-Glu-(OH)NH₂
(SEQ ID NO:727)
b565) RNH-Val-Pro-Leu-Ser-Arg-Thr-Xaa₃-Arg-Xaa₁-Thr-Xaa₂-Ile-Ser-Ile-Ser-Gln-
GlnXaa₄[linker]-Lys-Ala-Ile-Lys-Asn-Leu-Leu-Lys-Ala-Val-Ser-Lys-Glu-(OH)NH₂
(SEQ ID NO:728)
b566) RNH-Val-Pro-Leu-Ser-Arg-Thr-Val-Xaa₃-Xaa₁-Thr-Xaa₂-Ile-Ser-Ile-Ser-Gln-
GlnXaa₄[linker]-Lys-Ala-Ile-Lys-Asn-Leu-Leu-Lys-Ala-Val-Ser-Lys-Glu-(OH)NH₂

[0129] In the above structures:
[0130] R can be independently selected from substituted, unsubstituted, hetero-, straight-chained, branched, cyclic, saturated or unsaturated aliphatic radicals; or a substituted, unsubstituted, or hetero- aromatic radicals; PEG and derivatives thereof; and any other modifying group;
[0131] Xaa₁ is selected from the group consisting of any L- or D-natural amino acid and any non-natural amino acid.
[0132] Xaa₂ is selected from the group consisting of any L- or D-natural amino acid and any non-natural amino acid.
[0133] Xaa₃ is selected from the group consisting of L-Pro, D-Pro, P*, Btd and any L- or D-natural and non-natural amino acid.
[0134] Xaa₄ is selected from the group consisting of P*, Btd and any L- or D-natural amino acid and any non-natural amino acid.
[0135] P* is:

[chemical structure]

[0136] A wide variety of amino acid substitutions may be made in polypeptide sequences, such as lysine to glutamic acid, lysine to aspartic acid, Orn to Glu, Orn to Asp. Moieties other than naturally occurring amino acids may also be substituted, such as Btd:
[0137] Btd* is:

[chemical structure]

[0138] In some embodiments, R can be selected from the group consisting of hydrogen, alkyl, alkenyl, alkynyl, alkylcarbonyl, arylcarbonyl, aryl, PEG (polyethyleneglycol) and any other modifying group described herein. In some embodiments, R can comprise the peptide sequence Glu-Leu-Arg and a linker. In some embodiments, R can consist of only the peptide sequence Glu-Leu-Arg.

[0139] The linker is optional in some embodiments and can comprise, for example, any natural or non-natural amino acid. The amino acids can be represented by a formula: [chemical structure]
wherein R_{L} may be a substituted, unsubstituted, hetero-, straight-chained, branched, cyclic, saturated or unsaturated aliphatic radical; or a substituted, unsubstituted, or hetero- aromatic radical. In some embodiments, R_{L} can be substituted, unsubstituted, or hetero- forms of methyl, iso-propyl, sec-butyl, iso-butyl, benzyl, or a combination thereof.

[0140] In embodiments where R_{L} is substituted, examples of substitutents include, but are not limited to, hydroxyl, carboxyl, amino, imino groups and combinations thereof In embodiments where R_{L} is heteroaliphatic, examples of heteroatoms include, but are not limited to, sulfur, phosphorous, oxygen, nitrogen and combinations thereof In some embodiments, R_{L} can comprise substituted or unsubstituted poly(alkylene glycols), which include, but are not limited to, PEG, and PEG derivatives such as poly(ethylene oxide), poly(propylene glycol), poly(tetramethylene glycol), poly(ethylene oxide-co-propylene oxide), and copolymers and combinations thereof.

[0141] In some embodiments, R_{L} can be a substituted or unsubstituted alkylene comprising Cₙ carbons in the alkylene backbone, wherein n is an integer ranging from 1 to about 20; from about 2 to about 16; from about 3 to about 12; from about 4 to about 10; from about 3 to about 8, and any range therein. In these embodiments, R_{L} can be, for example, 11-amino-undecanoic acid.

[0142] In some embodiments, the linker comprises any combination of natural or non-natural amino acids, (Xaa), wherein the number of amino acids ranges from 1 to about 20; from about 2 to about 10; from about 3 to about 10, from about 1 to about 5, from about 1 to about 4, or any range therein. In some embodiments, the linker can comprise any combination of up to four natural or non-natural amino acids such as, for example, —(Gly)₄— (SEQ ID NO: 1640).

[0143] In some embodiments, there is no linker. In some embodiments, the mimetics are comprised of portions of the human CXC chemokine IP-10 that are connected directly to each other through amide bonds. In some embodiments, the mimetics are comprised of the human CXC chemokine IP-10 that are connected by disulfide bonds such as, the disulfide bonds that can form between Cys residues.

[0144] Any additional amino acids identified in square brackets in a header indicates that the peptide described by the header is at least an analog of a native fragment, and the position of the amino acid substitutions are noted by the standard abbreviation for the amino acid substituent with a superscript number indicating the residue positions at which the modification has occurred.

Methods of Administration

[0145] The terms “administer, “administration,” “administering,” and the like, can refer to a method of incorporating a compound into a subject to treat, prevent, or ameliorate the symptoms of, an abnormal condition in the subject. When a compound of the invention is provided in combination with one or more additional active agents, the administration can include administering the compound as a prodrug or codrug and can include sequential or concurrent administration with the other agent(s). One of skill will appreciate that any method of administration can be used in the practice of the present invention including, but not limited to, oral, injection, parenteral, dermal, and aerosol applications.

[0146] An “effective amount” of a compound of the invention includes a therapeutically effective amount or a prophylatically effective amount. A “therapeutically effective amount” refers to an amount effective, at dosages and for periods of time selectedby one of skill, to achieve the desired therapeutic result. The term “therapeutically effective amount” may also refer to that amount of active compound, prodrug or pharmaceutical agent that elicits a biological or medicinal response in a tissue, system, animal or human that is being sought by a researcher, veterinarian, medical doctor or other clinician in order to provide a therapeutic effect.

[0147] In some embodiments, a therapeutic effect relieves or prevents, to some extent, one or more of the symptoms of an abnormal condition. In some embodiments, a therapeutic effect can include, but is not limited to, one or more of the following: (a) an increase or decrease in the number of lymphocytic cells present at a specified location; (b) an increase or decrease in the ability of lymphocytic cells to migrate; (c) an increase or decrease in the response of lymphocytic cells to a stimulus; (d) an increase or decrease in the proliferation, growth, and/or differentiation of cells; (e) inhibition (i.e., slowing or stopping) or acceleration of cell death; (f) relieving, to some extent, one or more of the symptoms associated with an abnormal condition; (g) enhancing or inhibiting the function of the affected population of cells; (h) activating an enzyme activity present in cells associated with the abnormal condition; and (i) inhibiting an enzyme activity present in cells associated with the abnormal condition.

[0148] A “prophylactically effective amount” refers to an amount administered that is effective, at dosages and for periods of time determined readily by one of skill, at achieving a desired prophylactic result such as, for example, preventing or inhibiting a cytotoxic effect of a cytotoxic agent. Often, a prophylactic dose is used in organisms prior to, or at an early stage of, a disease, and in these embodiments, a prophylactically effective amount may be less than a therapeutically effective amount in some embodiments. The term “preventing” can refer, in some embodiments, to decreasing the probability that an organism contracts or develops an abnormal condition.

[0149] In some embodiments, the therapeutically or prophylactically effective amounts of chemokine analogs may range from about 0.1 nM-0.1 M, 0.1 nM-0.05 M, 0.05 nM-15 μM or 0.01 nM-10 μM, or any range therein. One of skill will appreciate that dosage values may vary with the severity of the condition to be alleviated. For any particular subject, specific dosage regimens may be adjusted over time according to the individual need and the professional judgement of the person administering or supervising the administration of the compositions. Accordingly, one of skill will also appreciate that the dosage ranges set forth herein are exemplary only and do not limit the dosage ranges that may be selected by medical practitioners.

[0150] The amount of active compound in the composition may vary according to factors such as the disease state, age, sex, and weight of the individual. Dosage regimens may be adjusted to provide the optimum therapeutic response. For example, a single bolus may be administered, several divided doses may be administered over time or the dose may be proportionally reduced or increased as indicated by the exigencies of the therapeutic situation. It may be advantageous to formulate parenteral compositions in dosage unit form for ease of administration and uniformity of dosage.

[0151] The term “dosage unit form” as used herein can refer to physically discrete units suited as unitary dosages for subjects to be treated; each unit containing a predetermined quantity of active compound calculated to produce the desired therapeutic effect in association with the required pharmaceutical carrier. The specification for the dosage unit forms of the invention are dictated by and directly dependent on (a) the unique characteristics of the active compound and the particular therapeutic effect to be achieved, and (b) the limitations inherent in the art of compounding such an active compound for the treatment of sensitivity in individuals.

[0152] The terms “pharmaceutically acceptable carrier” or “excipient” can include any and all solvents, dispersion media, coatings, antibacterial and antifungal agents, isotonic and absorption delaying agents, and the like that are physiologically compatible. In one embodiment, the carrier is suitable for parenteral administration. Alternatively, the carrier can be suitable for intravenous, intraperitoneal, intramuscular, sublingual or oral administration. Pharmaceutically acceptable carriers include sterile aqueous solutions or dispersions and sterile powders for the extemporaneous preparation of sterile injectable solutions or dispersion. The use of such media and agents for pharmaceutically active substances is well known in the art. Except insofar as any conventional media or agent is incompatible with the active compound, use thereof in the pharmaceutical compositions of the invention is contemplated. Supplementary active compounds can also be incorporated into the compositions. Pharmaceutically acceptable carrier “may comprise pharmaceutically acceptable salts.”

[0153] Therapeutic compositions typically must be sterile and stable under the conditions of manufacture and storage. The composition can be formulated as a solution, microemulsion, liposome, or other ordered structure suitable to high drug concentration. The carrier can be a solvent or dispersion medium containing, for example, water, ethanol, polyol (for example, glycerol, propylene glycol, and liquid polyethylene glycol, and the like), and suitable mixtures thereof. The proper fluidity can be maintained, for example, by the use of a coating such as lecithin, by the maintenance of the required particle size in the case of dispersion and by the use of surfactants. In many cases, it will be preferable to include isotonic agents, for example, sugars, polyalcohols such as mannitol, sorbitol, or sodium chloride in the composition. Prolonged absorption of the injectable compositions can be brought about by including in the composition an agent which delays absorption, for example, monostearate salts and gelatin.

[0154] Moreover, the chemokine analogs may be administered in a time release formulation, for example in a composition which includes a slow release polymer. The active compounds can be prepared with carriers that will protect the compound against rapid release, such as a controlled release formulation, including implants and microencapsulated delivery systems. Biodegradable, biocompatible polymers can be used, such as ethylene vinyl acetate, polyanhydrides, polyglycolic acid, collagen, polyorthoesters, polylactic acid and polylactic, polyglycolic copolymers (PLG). Many methods for the preparation of such formulations are patented or generally known to those skilled in the art.

[0155] Additionally, suspensions may be prepared for injection. Suitable lipophilic solvents or vehicles include fatty oils such as sesame oil; or synthetic fatty acid esters, such as ethyl oleate or triglycerides; or liposomes. Suspensions to be used for injection may also contain substances which increase the viscosity of the suspension, such as sodium carboxymethyl cellulose, sorbitol, or dextran. Optionally, the suspension may also contain suitable stabilizers or agents which increase the solubility of the compounds to allow for the preparation of highly concentrated solutions.

[0156] Pharmaceutical formulations for parenteral administration may include liposomes. Liposomes and emulsions are well known examples of delivery vehicles or carriers that are especially useful for hydrophobic drugs. Depending on biological stability of the therapeutic reagent, additional strategies for protein stabilization may be employed. Furthermore, one may administer the drug in a targeted drug delivery system, for example, in a liposome coated with target-specific antibody. The liposomes will bind to the target protein and be taken up selectively by the cell expressing the target protein.

[0157] Sterile injectable solutions can be prepared by incorporating the active compound in the required amount in an appropriate solvent with one or a combination of ingredients enumerated above, as required, followed by filtered sterilization. Generally, dispersions are prepared by incorporating the active compound into a sterile vehicle that contains a basic dispersion medium and the required other ingredients from those enumerated above. In the case of sterile powders for the preparation of sterile injectable solutions, the preferred methods of preparation are vacuum drying and freeze-drying which yields a powder of the active ingredient plus any additional desired ingredient from a previously sterile-filtered solution thereof In accordance with an alternative aspect of the invention, a chemokine analog may be formulated with one or more additional compounds that enhance the solubility of the chemokine analog such as, for example, through pegylation.

[0158] If the compounds of the invention are to be administered by inhalation, they may be conveniently delivered in the form of an aerosol spray presentation from pressurized packs or a nebuliser, together with the use of a suitable propellant, e.g., dichlorodifluoromethane, trichlorofluoromethane, dichlorotetrafluoroethane, carbon dioxide or other suitable gas. In the case of a pressurized aerosol the dosage unit may be determined by providing a valve to deliver a metered amount. Capsules and cartridges of gelatin, for example, for use in an inhaler may be formulated containing a powder mix of the compound and a suitable powder base such as starch or lactose.

[0159] The following examples illustrate, but do not limit, the present invention.

### EXAMPLE 1

[0160] Peptides of the invention may be synthesized chemically using the Fmoc/tBu strategy on a continuous flow peptide synthesizer, as for example has been carried out using the following protocols:

Reagents (solvents, support, chemicals)

[0161] Main Solvent: N,N-Dimethylformamide (DMF): certified ACS spectroanalyzed from Fisher (D131-4) M.W=73.10. The DMF is treated with activated molecular sieves, type 4A (from BDH: B54005) for at least two weeks then tested with FDNB (2,4-Dinitrofluorobenzene from Eastman).

[0162] Procedure: Mix equal volumes of FDNB solution (1 mg/ml in 95% EtOH) and DMF; Let stand 30 minutes; read the absorbance at 381 nm over a FDNB blank (0.5 ml FDNB+0.5 ml 95% EtOH). If the absorbance ˜0.2, the DMF is suitable to be used for the synthesis.

[0163] Deblocking Agent: 20% Piperidine (from Aldrich Chemical company, catalog No: 10,409-4) in DMF containing 0.5 % Triton X100 v/v ( from Sigma, catalg No: T-9284).

[0164] Activating Agents: 2-(H-benzotriazol-lyl) 1,1,3,3-tetramethyluronium tetrafluoroborate (TBTU: M.W.=321.09. from Quantum Richilieu, catalog No: R0139)/Hydroxybenzotriazole (HOBt M.W.=135.1 from Quantum Richilieu, catalog No.: R0166-100) respectively, 0.52 M in DMF and 4-Methylmorpholine (NMM; M.W.=101.15, d=0.926 from Aldrich, catalog No.: M5,655-7): 0.9 M in DMF or in the case of sensitive amino acids to racemization like Cys, we use 2,4,6—Collidine, 99% (M.W.=121.18, d=0.917, from Aldrich, catalog No: 14,238-7): 0.78M in DMF/DCM, 1/1 v/v.

[0165] Support: TentaGel R RAM (90 μm), RinK-type Fmoc (from Peptides International, catalog No.: RTS-9995-PI): 0.21 mmol/g, 0.5 g for 0.1 mmol of peptide.

[0166] Fmoc-L-amino derivative, side-chains protected with: Boc; tBu; Trt groups: with 4 fold excess (from Peptides International, Bachem, Novabiochem, Chem-Impex Inc). Glu24 and Lys24 are Allyl-protected (from Millipore/Perseptive Biosystems).

Initial Amino Loading and Peptide Synthesis Procedure

[0167] The first amino acid Asn31 and the remaining residues are double coupled at room temp. or at 45° C. automatically with 4-fold excess in each coupling. The synthesis is interrupted after residue Leu19. The peptide-bound support is removed from the synthesizer column and placed in a react-vial containing a small magnetic bar for gentle stirring.

### Removal of the Allyl Groups

[0168] A solution of tetrakis(triphenylphosphine)Palladium(0) Pd(PPh3)4 (from Sigma-Aldrich, catalog No: 21,666-6); M.W.=1155.58×0.1 mmol peptide×3 fold=347 mg dissolved in 5% Acetic Acid; 2.5% NMM in CHCl3 to 0.14 M, under argon. The solution is added to the support-bound peptide previously removed from the coulmn in a reactvial containing a small mangnetic bar for gentle stirring. The mixture is flushed with argon, sealed and stirred at room temperature for 6 hours. The support-bound peptide is transferred to a filter funnel, washed with 30 ml of a solution made of 0.5% Sodium Diethyldithiocarbonate/in DMF, then DCM; DCM/DMF (1:1) and DMF. A positive Kaiser test indicates the deprotection of the amino side chaine of the Lys20.

### Lactam Formation:

[0169] Activating agent: 7-Azabenztriazol-1-yloxytris (pyrrolindino) phosphonium-hexafluorophosphate (PyAOP: M.W.=521.7 from PerSeptive Biosystems GmbH, catalog No: GEN076531), 1.4-fold: 0.105mmol×1.4×521.7=76.6 mg and NMM 1.5-fold: 0.105×1.4×1.5=0.23 mmol v=0.23/0.9 M NNM solution=263 μl).

[0170] The cychsation may be carried out in an amino acid vial at room temperature overnight (˜16 hours) with gentle agitation. The completion of cyclization may be indicated by a negative kaiser test. The support-bound peptide may be poured into the column, washed with DMF and the synthesis continues to completion, with a cyclic amide bridge thereby introduced into the peptide.

[0171] Final Product Removal From The Support: the support-bound peptide is removed from the synthesizer in to a medium filter funnel, washed with DCM to replace the non-volatile DMF and thoroughly dried under high vacuum for at least two hours, or preferably, overnight. Support: 0.5 g resin-peptide.

[0172] Cleavage Mixture (reagent K): 100 ml of a trifluoroacetic acid (TFA)/Phenol/Water/Thio-Anisol/EDT (82/5/5/5/2.5)(v/v) mixture is prepared. The support-bound peptide (0.5 g) is poured into 7.5 ml of reagent K with gentle agitation on a rocker, allowed to react for 4 hours at room temperature, filtered, and washed with neat TFA. The 7.5 ml of reagent K contains the following:

| | | |
|---|---|---|
| TFA | 6.15 | ml (Halocarbon) |
| Phenol | 0.375 | ml (Aldrich) |
| Water | 0.375 | ml (MillQ) |
| Thio-Anisol | 0.375 | ml (Aldrich) |
| EDT | 0.187 | ml (Aldrich) |
| Total | 7.5 | ml |

[0173] The cleavage may be performed at room temperature for 4 hours with gentle agitation on a rocker.

### Precipitation of the Peptide

[0174] The cleaved peptide solution is filtered through a filter funnel in a 50 ml round bottom flask. The support is rinsed twice with 4 ml TFA. The TFA solution is concentrated on a rotavap and added drop wise into a cold diethyl ether previously treated with activated neutral aluminum oxide to make it free of peroxide. Approximately 10-fold excess of ether are used. The beads are stored until the yield is determined and peptide characterized. The precipitate is collected at room temperature in screw capped 50 ml polypropylene vial by centrifugation at 2K rpm using a top bench centrifuge (4 minutes run time). The pellet is washed 3× with cold ether, centrifuged and dried with a flow of argon. The precipitate is dissolved in 20% acetonitrile, 0.1% TFA and lyophilized.

### Crude Product Characterization:

[0175] The product is characterized by analytical HPLC.

Experimental conditions: Column: Vydac 218TP54: C18 reversed-phase 5 μm, 4.6 mm ID×150mm L.

[0176] Eluants: 0.1% TFA/H₂O (solvant A); 0.1% TFA/acetonitrile (solvent B).

[0177] Elution Conditions: 20-50% B (40 min); 60-90% B (5 min); 90-20% B (5 min); 20% B (10 min). At 1.0 ml/min and A214 nm=0.5 absorbance unit full scale.

### Sample Preparation:

[0178] An aliquot of the product is weighed and dissolved in 20% acetonitrile 0.1% TFA at a concentration of 2 mg/ml. The solution is microfuged and 20 μl is applied onto the column. The main peak or the major peaks are collected, SpeedVac dried and molecular weight determined by mass spectrometry.

### EXAMPLE 2

[0179] The following sequences were prepared for testing their ability to bind to an IP-10 receptor and their efficacy in mediating intracellular calcium mobilization ([Ca²⁺]i) at a variety of concentrations:

Acetylated-IP-10-(1-16)-[linker]-IP-10-(66-78)
(SEQ ID NO:1641)
Ac-Val-Pro-Leu-Ser-Arg-Thr-Val-Arg-Cys-Thr-Cys-Ile-Ser-Ile-Ser¹⁵-
Asn-UDA-Leu⁶⁶-Lys-Ala-Val-Ser-Lys-Glu-Met-Ser-Lys-Arg-Ser-Pro
Acetylated-[Ala⁹,Phe¹¹]-IP-10-(1-16)-[linker]-IP-10-(66-78)
(SEQ ID NO:1642)
Ac-Val-Pro-Leu-Ser-Arg-Thr-Val-Arg-Ala⁹-Thr-Phe¹¹-Ile-Ser-Ile-Ser¹⁵-
Asn-UDA-Leu⁶⁶-Lys-Ala-Val-Ser-Lys-Glu-Met-Ser-Lys-Arg-Ser-Pro
[Pro7]-IP-10-(1-15)-[linker]-IP-10-(58-71)
(SEQ ID NO:1643)
Val-Pro-Leu-Ser-Arg-Thr-Pro⁷-Arg-Cys-Thr-Cys-Ile-Ser-Ile-Ser¹⁵-
UDA-Glu⁵⁸-Ser-Lys-Ala-Ile-Lys-Asn-Leu-Leu-Lys-Ala-Val-Ser-Lys
[Ser⁹,Ser¹¹,Glu⁶³]-IP-10-(1-15)-[linker]-IP-10-(58-71)
(SEQ ID NO:1644)
Val-Pro-Leu-Ser-Arg-Thr-Val-Arg-Ser⁹-Thr-Ser¹¹-Ile-Ser-Ile-Ser¹⁵-
UDA-Glu⁵⁸-Ser-Lys-Ala-Ile-Glu⁶³-Asn-Leu-Leu-Lys-Ala-Val-Ser-Lys
[Ser⁹,Ser¹¹,Glu⁶⁷]-IP-10-(1-15)-[linker]-IP-10-(58-71)
(SEQ ID NO:1645)
Val-Pro-Leu-Ser-Arg-Tbr-Val-Arg-Ser⁹-Thr-Ser¹¹-Ile-Ser-Ile-Ser¹⁵-
UDA-Glu⁵⁸-Ser-Lys-Ala-Ile-Lys-Asn-Leu-Leu-Glu⁶⁷-Ala-Val-Ser-Lys

wherein, UDA is 11-amino undecanoic acid.

[0180] Binding and Calcium Mobilization: Suspensions of CXCR-3/300-19 cells were used to assess binding and intracellular calcium mobilization induced by IP-10 analogs. These are mouse pre-B lymphocytes transfected with the CXCR3 receptor, (Moser, et al). The cells were washed in RPMI media and resuspended in RPMI media supplemented with 10% FCS, then plated at 1.2×10⁵ cells per well of 96-well black wall/clear bottom plates coated with poly-D-lysine (Becton Dickinson) and loaded with 100 μL fluorescent calcium indicator FLIPR Calcium 3 assay kit component A (Molecular Probes) for lhr at 37° C. The cells on the plates were then spun at 1000 rpm for 15 minutes at room temperature.

[0181] Each of the sequences successfully bound to the cellular receptors. The intracellular calcium mobilization in response to 25 μL (0-100000 nM final concentrations) of the appropriate and various concentrations of analogue was measured at 37° C. by monitoring fluorescence as a function of time in all the wells using the

[0182] Flexstation Fluorometric Imaging Plate Reader (Molecular Devices). All analogues were run simultaneously with rhIP-10 (R&D Systems) as the standard. Table 1 provides the dosage effect of the binding of each of the IP-10 analogs on the calcium mobilization activity of the cells.

TABLE 1

| Peptide Analogs | Dosage (μM) | | | | |
|---|---|---|---|---|---|
| (SEQ ID NO:) | 1.2 | 3.7 | 11.1 | 33.3 | 100 |
| 1641 | 12.6 | 12.7 | 14.1 | 20 | 52.9 |
| 1642 | 15.2 | 13.8 | 15.4 | 20 | 3.1 |
| 1643 | 16 | 14 | 14.4 | 18.6 | 55.1 |
| 1644 | 18.8 | 18.5 | 17.2 | 18.9 | 46.6 |
| 1645 | 17.4 | 15.4 | 12.5 | 13.3 | 3.4 |

[0183] FIG. 1 illustrates the induction of [Ca²⁺]i mobilization by select IP-10 analogs at a concentration of 100 μM according to some embodiments of the present invention. The results are representative of three independent experiments. SEQ ID NOs: 1641-1645 all bound to the receptor and affected calcium mobilization. SEQ ID NOs: 1641, 1643, and 1644, however, increased calcium mobilization by 300 to over 500%. The results are compared to a recombinant human IP-10 chemokine, as described above.

[0184] The acetylated-IP-10-(1-16)-[linker]-IP-10-(66-78) analog represented by SEQ ID NO: 1641 increased intracellular calcium mobilization by nearly 500%, but an [Ala⁹,Phe¹¹] amino acid substitution in the same type of analog decreased the effect on calcium mobilization dramatically as shown by the effects of SEQ ID NO: 1642.

[0185] In an IP-10-(1-15)-[linker]-IP-10-(58-71) analog, a [Pro⁷] amino acid substitution in SEQ ID NO: 1643 resulted in an increase in intracellular calcium mobilization when compared to the results of SEQ ID NO: 1641. A [Ser⁹,Ser¹¹,Glu⁶³] amino acid substitution of the same type of analog still provide a very substantial increase in intracellular calcium mobilization of over 300% using SEQ ID NO: 1644. Interestingly, however, a [Glu⁶⁷] amino acid substitution decreased the effect on calcium mobilization dramatically as shown by the effect of SEQ ID NO: 1645.

[0186] The results provided by this example show that IP-10 analogs having a total of about 30 amino acids and conserving N-terminal residues 1-15 and C-terminal residues 66-71 of the IP-10 chemokine are effective at binding and can increase the cellular activity induced by the binding to different degrees, depending on the dosage of the analog administered and the presence of amino acid substitutions. In particular, the results suggest that the Cys⁹ and Cys¹¹ residues can be substituted with Ser⁹ and Ser¹¹ in the conserved N-terminal 1-15 region with little effect, and Lys⁶³ can be substituted by Glu⁶³ with little effect, but substantial differences in results occur where Lys⁶⁷ is substituted with Glu⁶⁷, which is in the range of the conserved C-terminal region of 66-71.

[0187] Accordingly, an IP-10 analog that is supported by these results would range from about 21 to about 34 amino acids in length and comprise:
[0188] an N-terminal region comprising and conserving the IP-10 chemokine residues 1-15
[0189] R-Val-Pro-Leu-Ser-Arg-Thr-Val-Arg-Cys-Thr-Cys-Ile-Ser-Ile-Ser¹⁵-
[0190] (OH)NH₂
[0191] (SEQ ID NO: 1646), and conservatively modified variants thereof,
[0192] a C-terminal region comprising and conserving the IP-10 chemokine residues 66-71, and conservatively modified variants thereof,
[0193] Leu⁶⁶-Lys-Ala-Val-Ser-Lys⁷¹-(OH)NH₂
[0194] (SEQ ID NO: 1647), and conservatively modified variants thereof,
[0195] and an optional linker having up to 4 amino acids, wherein the linker is preferably 11-aminoundecanoic acid.

### EXAMPLE 3

[0196] An IP-10 can be modified with a polysaccharide such as heparin. The glycosaminoglycan can be connected to an amine functional group as an aldehyde-terminated heparin. An example of an aldehyde-terminated heparin is represented by the following formula: [chemical structure]
wherein p is an integer not equal to 0.

[0197] The aldehyde-terminated heparin can be combined with the amine functional group in a DMF/water solvent and subsequently reduced with NaCNBH₃ to produce the following structure:

[chemical structure]

### EXAMPLE 4

[0198] An IP-10 mimetic can be modified with a polyalkylene glycol using a variety of techniques. There are a variety of available PEG sizes and derivatives that are commercially designed for specific applications such as, for example, attachment to a variety of different chemical functionalities including, but not limited to, amines, thiols, hydroxyls, sulfhydryls, and carboxyls.

[0199] In one example, an amine group of an IP-10 can be combined with a carboxyl-terminated PEG (Nektar Corp.) in the presence of, for example, EDC or DCC to form the following structure: [chemical structure]
wherein m is an integer not equal to 0.

[0200] In another example, either a succinimidyl derivative of mPEG (Nektar Corp.) or an isocyanate-terminated mPEG (Nektar Corp.) can be combined with an IP-10 mimetic under conditions known to those of skill in the art. In another example, the carboxyl group of an IP-10 mimetic can be activated with, for example, EDC or DCC and combined with an amino-terminated mPEG (Nektar Corp.) In another example, an amine group of an IP-10 mimetic can be combined with a methacrylate-terminated mPEG (Nektar Corp.) in the presence of an initiator capable of undergoing thermal or photolytic free radical decomposition. Examples of suitable initiators include benzyl-N,N-diethyldithiocarbamate or p-xylene-N,N-diethyldithiocarbamate.

[0201] The invention is not limited in its application to the details of structures and the arrangements of components set forth herein. It should be understood that although the present invention has been disclosed using select embodiments and optional features, modifications and variations of the inventions can be readily made by those skilled in the art, and that such modifications and variations are considered to be within the scope of the inventions.

[0202] The inventions have been described broadly and generically herein, and Applicant includes an inherent proviso, or negative limitation, that will allow removing any species subject matter from genus teachings, regardless or whether or not the material to be removed was specifically recited or stated as being removable. Some changes can be made in the form and detail of the teachings by one of skill without departing from the spirit and the scope of the invention. All patents and publications described herein are hereby incorporated by reference to the same extent as if each individual patent or publication was specifically and individually indicated to be incorporated by reference herein in its entirety.

We claim:

1. A composition comprising an IP-10 chemokine analog having a length ranging from about 21 to about 34 amino acids and comprising:
a first conserved sequence consisting of the IP-10 chemokine residues 1-15,
Val¹-Pro-Leu-Ser-Arg-Thr-Val-Arg-Cys-Thr-Cys-Ile-Ser-Ile-Ser¹⁵
(SEQ ID NO: 1646), and conservatively modified variants thereof;
a second conserved sequence consisting of the IP-10 chemokine residues 66-71,
Leu⁶⁶-Lys-Ala-Val-Ser-Lys⁷¹
(SEQ ID NO: 1647), and conservatively modified variants thereof; and,
an optional linker having up to 4 amino acids; wherein,
the N-terminus of the IP-10 analog consists of a hydrogen or is modified using an N-terminal modifier comprising a component selected from a group consisting of a poly(ethylene glycol) or derivative thereof, a glycosarninoglycan, a diagnostic label, a radioactive group, an acyl group, an acetyl group, a peptide, and a modifier capable of reducing the ability of the IP-10 analog to act as a substrate for aminopeptidases;
and the linker is selected from a group consisting of (a) up to four natural amino acids, and (b) any non-natural amino acid having the following structure: [chemical structure]
wherein, R_{L} is selected from a group consisting of saturated and unsaturated aliphatics and heteroaliphatics consisting of 20 or fewer carbon atoms that are optionally substituted with a hydroxyl, carboxyl, amino, amido, or imino group; or an aromatic group having from 5 to 7 members in the ring; and —(CH₂)ₙ—, wherein n is an integer ranging from 1 to 20.

2. The composition of claim 1 having a length of about 26 to 32 amino acid residues and comprising:
an N-terminal region consisting essentially of SEQ ID NO: 1646 and conservatively modified variants thereof in residues 1-15, and
a C-terminal region comprising SEQ ID NO: 1647 and conservatively modified variants thereof

3. The composition of claim 1, wherein the linker is 11-aminoundecanoic acid.

4. The analog of claim 1 comprising an amino acid sequence selected from a group consisting of SEQ ID NO: 1641, SEQ ID NO: 1642, SEQ ID NO: 1643, SEQ ID NO: 1644, and SEQ ID NO: 1645.

5. The composition of claim 1 comprising an amino acid sequence selected from a group consisting of SEQ ID NOs:296-349 and 404-457, variants b134-b187 and b242-b295, inclusive; wherein, Xaa₁, Xaa₂, Xaa₃, and Xaa₄ are each independently selected from a group consisting of any natural amino acid or any non-natural amino acid having the following structure: [chemical structure]
wherein, R_{L} is selected from a group consisting of saturated and unsaturated aliphatics and heteroaliphatics consisting of 20 or fewer carbon atoms that are optionally substituted with a hydroxyl, carboxyl, amino, amido, or imino group; or an aromatic group having from 5 to 7 members in the ring; and —(CH₂)ₙ—, wherein n is an integer ranging from 1 to 20.

6. The composition of claim 5, wherein the linker is 11-aminoundecanoic acid.

7. The composition of claim 1 comprising an amino acid sequence selected from a group consisting of SEQ ID NOs:494-548 and 675-728, variants b332-b385 and b512-b566, inclusive; wherein, Xaa₁, Xaa₂, Xaa₃, and Xaa₄ are each independently selected from a group consisting of any natural amino acid or any non-natural amino acid having the following structure: [chemical structure]
wherein, R_{L} is selected from a group consisting of saturated and unsaturated aliphatics and heteroaliphatics consisting of 20 or fewer carbon atoms that are optionally substituted with a hydroxyl, carboxyl, amino, amido, or imino group; or an aromatic group having from 5 to 7 members in the ring; and —(CH₂)ₙ—, wherein n is an integer ranging from 1 to 20.

8. The composition of claim 5, wherein the linker is 11-aminoundecanoic acid.

9. A method of increasing the IP-10-mediated activity of a cell having a receptor capable of binding to an IP-10 analog, comprising:
binding the receptor to an IP-10 analog having a length ranging from about 21 to about 34 amino acids and comprising:
a first conserved sequence consisting of the IP-10 chemokine residues 1-15,
Val¹-Pro-Leu-Ser-Arg-Thr-Val-Arg-Cys-Thr-Cys-Ile-Ser-Ile-Ser¹⁵
(SEQ ID NO: 1646), and conservatively modified variants thereof;
a second conserved sequence consisting of the IP-10 chemokine residues 66-71,
Leu⁶⁶-Lys-Ala-Val-Ser-Lys⁷¹
(SEQ ID NO: 1647), and conservatively modified variants thereof; and,
an optional linker having up to 4 amino acids; wherein,
the N-terminus of the IP-10 analog consists of a hydrogen or is modified using an N-terminal modifier comprising a component selected from a group consisting of a poly(ethylene glycol) or derivative thereof, a glycosaminoglycan, a diagnostic label, a radioactive group, an acyl group, an acetyl group, a peptide, and a modifier capable of reducing the ability of the IP-10 analog to act as a substrate for aminopeptidases;
and the linker is selected from a group consisting of (a) up to four natural amino acids, and (b) any non-natural amino acid having the following structure: [chemical structure]
wherein, R_{L} is selected from a group consisting of saturated and unsaturated aliphatics and heteroaliphatics consisting of 20 or fewer carbon atoms that are optionally substituted with a hydroxyl, carboxyl, amino, amido, or imino group; or an aromatic group having from 5 to 7 members in the ring; and —(CH₂)ₙ—, wherein n is an integer ranging from 1 to 20.

10. The method of claim 9, wherein the IP-10 analog has a length of about 26 to 32 amino acid residues and comprises:
an N-terminal region consisting essentially of SEQ ID NO: 1646 and conservatively modified variants thereof in residues 1-15, and
a C-terminal region comprising SEQ ID NO: 1647 and conservatively modified variants thereof.

11. The method of claim 9, wherein the linker is 11-aminoundecanoic acid.

12. The method of claim 9, wherein the IP-10 analog comprises an amino acid sequence selected from a group consisting of SEQ ID NO: 1641, SEQ ID NO: 1642, SEQ ID NO: 1643, SEQ ID NO: 1644, and SEQ ID NO: 1645.

13. The method of claim 9 comprising an amino acid sequence selected from a group consisting of SEQ ID NOs:296-349 and 404-457, variants b134-b187 and b242-b295, inclusive; wherein, Xaa₁, Xaa₂, Xaa₃, and Xaa₄ are each independently selected from a group consisting of any natural amino acid or any non-natural amino acid having the following structure: [chemical structure]
wherein, R_{L} is selected from a group consisting of saturated and unsaturated aliphatics and heteroaliphatics consisting of 20 or fewer carbon atoms that are optionally substituted with a hydroxyl, carboxyl, amino, amido, or imino group; or an aromatic group having from 5 to 7 members in the ring; and —(CH₂)ₙ—, wherein n is an integer ranging from 1 to 20.

14. The method of claim 13, wherein the linker is 11-aminoundecanoic acid.

15. The method of claim 9 comprising an amino acid sequence selected from a group consisting of SEQ ID NOs:494-548 and 675-728, variants b332-b385 and b512-b566, inclusive; wherein, Xaa₁, Xaa₂, Xaa₃, and Xaa₄ are each independently selected from a group consisting of any natural amino acid or any non-natural amino acid having the following structure: [chemical structure]
wherein, R_{L} is selected from a group consisting of saturated and unsaturated aliphatics and heteroaliphatics consisting of 20 or fewer carbon atoms that are optionally substituted with a hydroxyl, carboxyl, amino, amido, or imino group; or an aromatic group having from 5 to 7 members in the ring; and —(CH₂)ₙ—, wherein n is an integer ranging from 1 to 20.

16. The method of claim 15, wherein the linker is 11-aminoundecanoic acid.

17. An antibody produced using the IP-10 analog of claim 1 as an antigen.

18. The antibody of claim 17, wherein the antibody is monoclonal.

19. The antibody of claim 17, wherein the antibody is humanized.

20. The antibody of claim 17, wherein the antigen is the IP-10 analog of claim 4.

The application's sequence listing, which the Patent Office published only in electronic form, follows.

SEQUENCE LISTING (1647 sequences)

SEQ ID NO: 1 - protein, 77 aa, Artificial Sequence
  Description of Artificial Sequence: Synthetic peptide
AVIPRSAKELRCQCIKTYSKPFHPKFIKELRVIESGPHCANTEIIVKLSDGRELCLDPKENWVQRVVEKFLKRAENS

SEQ ID NO: 2 - protein, 78 aa, Artificial Sequence
  Description of Artificial Sequence: Synthetic peptide
VPLSRTVRCTCISISNQPVNPPRSLEKLEIIPASQFCPRVEIIATMKKKGEKRCLNPESKAIKNLLKAVSKEMSKRSP

SEQ ID NO: 3 - protein, 69 aa, Artificial Sequence
  Description of Artificial Sequence: Synthetic peptide
SLAADTPTACCFSYTSRQIPQNFIADYFETSSQCSKPGVIFLTKRSRQVCADPSEEWVQKYVSDLELSA

SEQ ID NO: 4 - protein, 68 aa, Artificial Sequence
  Description of Artificial Sequence: Synthetic peptide
SPYSSDTTPCCFAYIARPLPRAHIKEYFYTSGKCSNPAVVFVTRKNRQVCANPEKKWVREYINSLEMS

SEQ ID NO: 5 - protein, 73 aa, Artificial Sequence
  Description of Artificial Sequence: Synthetic peptide
KSMQVPFSRCCFSFAEQEIPLRAILCYRNTSSICSNEGLIFKLKRGKEACALDTVGWVQRHRKMLRHCPSKRK

SEQ ID NO: 6 - skipped

SEQ ID NO: 7 - protein, 76 aa, Artificial Sequence
  Description of Artificial Sequence: Synthetic peptide
QPDAINAPVTCCYNFTNRKISVQRLASYRRITSSKCPKEAVIFKTIVAKEICADPKQKWVQDSMDHLDKQTQTPKT

SEQ ID NO: 8 - protein, 105 aa, Artificial Sequence
  Description of Artificial Sequence: Synthetic peptide
ILPIASSCCTEVSHHISRRLLERVNMCRIQRADGDCDLAAVILHVKRRRICVSPHNHTVKQWMKVQAAKKNGKGNVCHRKKHHGKRNSNRAHQGKHETYGHKTPY

SEQ ID NO: 9 - protein, 15 aa, Artificial Sequence
  Description of Artificial Sequence: Synthetic peptide
  c-term may be amidated
SAKELRCQCIKTYSK

SEQ ID NO: 10 - protein, 15 aa, Artificial Sequence
  Description of Artificial Sequence: Synthetic peptide
  MOD_RES (7)..(7): Any L- or D-natural amino acid and any non-natural amino acid; see  specification as filed for detail ed description of substitutions, R-groups  and preferred embodiments
  MOD_RES (9)..(9): Any L- or D-natural amino acid and any non-natural amino acid; see  specification as filed for detail ed description of substitutions, R-groups  and preferred embodiments
  c-term may be amidated
SAKELRXQXIKTYSK

SEQ ID NO: 11 - protein, 15 aa, Artificial Sequence
  Description of Artificial Sequence: Synthetic peptide
  MOD_RES (1)..(1): Any L- or D-natural amino acid and any non-natural amino acid; see  specification as filed for detail ed description of substitutions, R-groups  and preferred embodiments
  MOD_RES (7)..(7): Any L- or D-natural amino acid and any non-natural amino acid; see  specification as filed for detail ed description of substitutions, R-groups  and preferred embodiments
  MOD_RES (9)..(9): Any L- or D-natural amino acid and any non-natural amino acid; see  specification as filed for detail ed description of substitutions, R-groups  and preferred embodiments
  c-term may be amidated
XAKELRXQXIKTYSK

SEQ ID NO: 12 - protein, 15 aa, Artificial Sequence
  Description of Artificial Sequence: Synthetic peptide
  MOD_RES (2)..(2): Any L- or D-natural amino acid and any non-natural amino acid; see  specification as filed for detail ed description of substitutions, R-groups  and preferred embodiments
  MOD_RES (7)..(7): Any L- or D-natural amino acid and any non-natural amino acid; see  specification as filed for detail ed description of substitutions, R-groups  and preferred embodiments
  MOD_RES (9)..(9): Any L- or D-natural amino acid and any non-natural amino acid; see  specification as filed for detail ed description of substitutions, R-groups  and preferred embodiments
  c-term may be amidated
SXKELRXQXIKTYSK

SEQ ID NO: 13 - protein, 15 aa, Artificial Sequence
  Description of Artificial Sequence: Synthetic peptide
  MOD_RES (3)..(3): Any L- or D-natural amino acid and any non-natural amino acid; see  specification as filed for detail ed description of substitutions, R-groups  and preferred embodiments
  MOD_RES (7)..(7): Any L- or D-natural amino acid and any non-natural amino acid; see  specification as filed for detail ed description of substitutions, R-groups  and preferred embodiments
  MOD_RES (9)..(9): Any L- or D-natural amino acid and any non-natural amino acid; see  specification as filed for detail ed description of substitutions, R-groups  and preferred embodiments
  c-term may be amidated
SAXELRXQXIKTYSK

SEQ ID NO: 14 - protein, 13 aa, Artificial Sequence
  Description of Artificial Sequence: Synthetic peptide
  c-term may be amidated
SAKELRCQCIKTY

SEQ ID NO: 15 - protein, 13 aa, Artificial Sequence
  Description of Artificial Sequence: Synthetic peptide
  MOD_RES (7)..(7): Any L- or D-natural amino acid and any non-natural amino acid; see  specification as filed for detail ed description of substitutions, R-groups  and preferred embodiments
  MOD_RES (9)..(9): Any L- or D-natural amino acid and any non-natural amino acid; see  specification as filed for detail ed description of substitutions, R-groups  and preferred embodiments
  c-term may be amidated
SAKELRXQXIKTY

SEQ ID NO: 16 - protein, 13 aa, Artificial Sequence
  Description of Artificial Sequence: Synthetic peptide
  MOD_RES (1)..(1): Any L- or D-natural amino acid and any non-natural amino acid; see  specification as filed for detail ed description of substitutions, R-groups  and preferred embodiments
  MOD_RES (7)..(7): Any L- or D-natural amino acid and any non-natural amino acid; see  specification as filed for detail ed description of substitutions, R-groups  and preferred embodiments
  MOD_RES (9)..(9): Any L- or D-natural amino acid and any non-natural amino acid; see  specification as filed for detail ed description of substitutions, R-groups  and preferred embodiments
  c-term may be amidated
XAKELRXQXIKTY

SEQ ID NO: 17 - protein, 13 aa, Artificial Sequence
  Description of Artificial Sequence: Synthetic peptide
  MOD_RES (2)..(2): Any L- or D-natural amino acid and any non-natural amino acid; see  specification as filed for detail ed description of substitutions, R-groups  and preferred embodiments
  MOD_RES (7)..(7): Any L- or D-natural amino acid and any non-natural amino acid; see  specification as filed for detail ed description of substitutions, R-groups  and preferred embodiments
  MOD_RES (9)..(9): Any L- or D-natural amino acid and any non-natural amino acid; see  specification as filed for detail ed description of substitutions, R-groups  and preferred embodiments
  c-term may be amidated
SXKELRXQXIKTY

SEQ ID NO: 18 - protein, 13 aa, Artificial Sequence
  Description of Artificial Sequence: Synthetic peptide
  MOD_RES (3)..(3): Any L- or D-natural amino acid and any non-natural amino acid; see  specification as filed for detail ed description of substitutions, R-groups  and preferred embodiments
  MOD_RES (7)..(7): Any L- or D-natural amino acid and any non-natural amino acid; see  specification as filed for detail ed description of substitutions, R-groups  and preferred embodiments
  MOD_RES (9)..(9): Any L- or D-natural amino acid and any non-natural amino acid; see  specification as filed for detail ed description of substitutions, R-groups  and preferred embodiments
  c-term may be amidated
SAXELRXQXIKTY

SEQ ID NO: 19 - protein, 11 aa, Artificial Sequence
  Description of Artificial Sequence: Synthetic peptide
  c-term may be amidated
SAKELRCQCIK

SEQ ID NO: 20 - protein, 11 aa, Artificial Sequence
  Description of Artificial Sequence: Synthetic peptide
  MOD_RES (7)..(7): Any L- or D-natural amino acid and any non-natural amino acid; see  specification as filed for detail ed description of substitutions, R-groups  and preferred embodiments
  MOD_RES (9)..(9): Any L- or D-natural amino acid and any non-natural amino acid; see  specification as filed for detail ed description of substitutions, R-groups  and preferred embodiments
  c-term may be amidated
SAKELRXQXIK

SEQ ID NO: 21 - protein, 11 aa, Artificial Sequence
  Description of Artificial Sequence: Synthetic peptide
  MOD_RES (1)..(1): Any L- or D-natural amino acid and any non-natural amino acid; see  specification as filed for detail ed description of substitutions, R-groups  and preferred embodiments
  MOD_RES (7)..(7): Any L- or D-natural amino acid and any non-natural amino acid; see  specification as filed for detail ed description of substitutions, R-groups  and preferred embodiments
  MOD_RES (9)..(9): Any L- or D-natural amino acid and any non-natural amino acid; see  specification as filed for detail ed description of substitutions, R-groups  and preferred embodiments
  c-term may be amidated
XAKELRXQXIK

SEQ ID NO: 22 - protein, 11 aa, Artificial Sequence
  Description of Artificial Sequence: Synthetic peptide
  MOD_RES (2)..(2): Any L- or D-natural amino acid and any non-natural amino acid; see  specification as filed for detail ed description of substitutions, R-groups  and preferred embodiments
  MOD_RES (7)..(7): Any L- or D-natural amino acid and any non-natural amino acid; see  specification as filed for detail ed description of substitutions, R-groups  and preferred embodiments
  MOD_RES (9)..(9): Any L- or D-natural amino acid and any non-natural amino acid; see  specification as filed for detail ed description of substitutions, R-groups  and preferred embodiments
  c-term may be amidated
SXKELRXQXIK

SEQ ID NO: 23 - protein, 11 aa, Artificial Sequence
  Description of Artificial Sequence: Synthetic peptide
  MOD_RES (3)..(3): Any L- or D-natural amino acid and any non-natural amino acid; see  specification as filed for detail ed description of substitutions, R-groups  and preferred embodiments
  MOD_RES (7)..(7): Any L- or D-natural amino acid and any non-natural amino acid; see  specification as filed for detail ed description of substitutions, R-groups  and preferred embodiments
  MOD_RES (9)..(9): Any L- or D-natural amino acid and any non-natural amino acid; see  specification as filed for detail ed description of substitutions, R-groups  and preferred embodiments
  c-term may be amidated
SAXELRXQXIK

SEQ ID NO: 24 - protein, 25 aa, Artificial Sequence
  Description of Artificial Sequence: Synthetic peptide
  c-term may be amidated
AIKTYSKPFHPKFIKELRVIESGPH

SEQ ID NO: 25 - protein, 16 aa, Artificial Sequence
  Description of Artificial Sequence: Synthetic peptide
  c-term may be amidated
AANTEIIVKLSDGREL

SEQ ID NO: 26 - protein, 22 aa, Artificial Sequence
  Description of Artificial Sequence: Synthetic peptide
  c-term may be amidated
LDPKENWVQRVVEKFLKRAENS

SEQ ID NO: 27 - protein, 35 aa, Artificial Sequence
  Description of Artificial Sequence: Synthetic peptide
  MOD_RES (16)..(19): Any L- or D-natural or non-natural amino acid, and this range may  encompass 1 or 4 residues; see spe cification as filed for detailed  description of substitutions, R-groups and preferred embodi
  c-term may be amidated
SAKELRCQCIKTYSKXXXXNWVQRVVEKFLKRAEN

SEQ ID NO: 28 - protein, 35 aa, Artificial Sequence
  Description of Artificial Sequence: Synthetic peptide
  MOD_RES (7)..(7): Any L- or D-natural amino acid and any non-natural amino acid; see  specification as filed for detail ed description of substitutions, R-groups  and preferred embodiments
  MOD_RES (9)..(9): Any L- or D-natural amino acid and any non-natural amino acid; see  specification as filed for detail ed description of substitutions, R-groups  and preferred embodiments
  MOD_RES (16)..(19): Any L- or D-natural or non-natural amino acid, and this range may  encompass 1 or 4 residues; see spe cification as filed for detailed  description of substitutions, R-groups and preferred embodi
  c-term may be amidated
SAKELRXQXIKTYSKXXXXNWVQRVVEKFLKRAEN

SEQ ID NO: 29 - protein, 35 aa, Artificial Sequence
  Description of Artificial Sequence: Synthetic peptide
  MOD_RES (1)..(1): Any L- or D-natural amino acid and any non-natural amino acid; see  specification as filed for detail ed description of substitutions, R-groups  and preferred embodiments
  MOD_RES (7)..(7): Any L- or D-natural amino acid and any non-natural amino acid; see  specification as filed for detail ed description of substitutions, R-groups  and preferred embodiments
  MOD_RES (9)..(9): Any L- or D-natural amino acid and any non-natural amino acid; see  specification as filed for detail ed description of substitutions, R-groups  and preferred embodiments
  MOD_RES (16)..(19): Any L- or D-natural or non-natural amino acid, and this range may  encompass 1 or 4 residues; see spe cification as filed for detailed  description of substitutions, R-groups and preferred embodi
  c-term may be amidated
XAKELRXQXIKTYSKXXXXNWVQRVVEKFLKRAEN

SEQ ID NO: 30 - protein, 35 aa, Artificial Sequence
  Description of Artificial Sequence: Synthetic peptide
  MOD_RES (2)..(2): Any L- or D-natural amino acid and any non-natural amino acid; see  specification as filed for detail ed description of substitutions, R-groups  and preferred embodiments
  MOD_RES (7)..(7): Any L- or D-natural amino acid and any non-natural amino acid; see  specification as filed for detail ed description of substitutions, R-groups  and preferred embodiments
  MOD_RES (9)..(9): Any L- or D-natural amino acid and any non-natural amino acid; see  specification as filed for detail ed description of substitutions, R-groups  and preferred embodiments
  MOD_RES (16)..(19): Any L- or D-natural or non-natural amino acid, and this range may  encompass 1 or 4 residues; see spe cification as filed for detailed  description of substitutions, R-groups and preferred embodi
  c-term may be amidated
SXKELRXQXIKTYSKXXXXNWVQRVVEKFLKRAEN

SEQ ID NO: 31 - protein, 35 aa, Artificial Sequence
  Description of Artificial Sequence: Synthetic peptide
  MOD_RES (3)..(3): Any L- or D-natural amino acid and any non-natural amino acid; see  specification as filed for detail ed description of substitutions, R-groups  and preferred embodiments
  MOD_RES (7)..(7): Any L- or D-natural amino acid and any non-natural amino acid; see  specification as filed for detail ed description of substitutions, R-groups  and preferred embodiments
  MOD_RES (9)..(9): Any L- or D-natural amino acid and any non-natural amino acid; see  specification as filed for detail ed description of substitutions, R-groups  and preferred embodiments
  MOD_RES (16)..(19): Any L- or D-natural or non-natural amino acid, and this range may  encompass 1 or 4 residues; see spe cification as filed for detailed  description of substitutions, R-groups and preferred embodi
  c-term may be amidated
SAXELRXQXIKTYSKXXXXNWVQRVVEKFLKRAEN

SEQ ID NO: 32 - protein, 35 aa, Artificial Sequence
  Description of Artificial Sequence: Synthetic peptide
  MOD_RES (7)..(7): Any L- or D-natural amino acid and any non-natural amino acid; see  specification as filed for detail ed description of substitutions, R-groups  and preferred embodiments
  MOD_RES (9)..(10): Any L- or D-natural amino acid and any non-natural amino acid; see  specification as filed for detail ed description of substitutions, R-groups  and preferred embodiments
  MOD_RES (16)..(19): Any L- or D-natural or non-natural amino acid, and this range may  encompass 1 or 4 residues; see spe cification as filed for detailed  description of substitutions, R-groups and preferred embodi
  c-term may be amidated
SAKELRXQXXKTYSKXXXXNWVQRVVEKFLKRAEN

SEQ ID NO: 33 - protein, 35 aa, Artificial Sequence
  Description of Artificial Sequence: Synthetic peptide
  MOD_RES (1)..(1): Any L- or D-natural amino acid and any non-natural amino acid; see  specification as filed for detail ed description of substitutions, R-groups  and preferred embodiments
  MOD_RES (7)..(7): Any L- or D-natural amino acid and any non-natural amino acid; see  specification as filed for detail ed description of substitutions, R-groups  and preferred embodiments
  MOD_RES (9)..(10): Any L- or D-natural amino acid and any non-natural amino acid; see  specification as filed for detail ed description of substitutions, R-groups  and preferred embodiments
  MOD_RES (16)..(19): Any L- or D-natural or non-natural amino acid, and this range may  encompass 1 or 4 residues; see spe cification as filed for detailed  description of substitutions, R-groups and preferred embodi
  c-term may be amidated
XAKELRXQXXKTYSKXXXXNWVQRVVEKFLKRAEN

SEQ ID NO: 34 - protein, 35 aa, Artificial Sequence
  Description of Artificial Sequence: Synthetic peptide
  MOD_RES (2)..(2): Any L- or D-natural amino acid and any non-natural amino acid; see  specification as filed for detail ed description of substitutions, R-groups  and preferred embodiments
  MOD_RES (7)..(7): Any L- or D-natural amino acid and any non-natural amino acid; see  specification as filed for detail ed description of substitutions, R-groups  and preferred embodiments
  MOD_RES (9)..(10): Any L- or D-natural amino acid and any non-natural amino acid; see  specification as filed for detail ed description of substitutions, R-groups  and preferred embodiments
  MOD_RES (16)..(19): Any L- or D-natural or non-natural amino acid, and this range may  encompass 1 or 4 residues; see spe cification as filed for detailed  description of substitutions, R-groups and preferred embodi
  c-term may be amidated
SXKELRXQXXKTYSKXXXXNWVQRVVEKFLKRAEN

SEQ ID NO: 35 - protein, 35 aa, Artificial Sequence
  Description of Artificial Sequence: Synthetic peptide
  MOD_RES (3)..(3): Any L- or D-natural amino acid and any non-natural amino acid; see  specification as filed for detail ed description of substitutions, R-groups  and preferred embodiments
  MOD_RES (7)..(7): Any L- or D-natural amino acid and any non-natural amino acid; see  specification as filed for detail ed description of substitutions, R-groups  and preferred embodiments
  MOD_RES (9)..(10): Any L- or D-natural amino acid and any non-natural amino acid; see  specification as filed for detail ed description of substitutions, R-groups  and preferred embodiments
  MOD_RES (16)..(19): Any L- or D-natural or non-natural amino acid, and this range may  encompass 1 or 4 residues; see spe cification as filed for detailed  description of substitutions, R-groups and preferred embodi
  c-term may be amidated
SAXELRXQXXKTYSKXXXXNWVQRVVEKFLKRAEN

SEQ ID NO: 36 - protein, 35 aa, Artificial Sequence
  Description of Artificial Sequence: Synthetic peptide
  MOD_RES (7)..(7): Any L- or D-natural amino acid and any non-natural amino acid; see  specification as filed for detail ed description of substitutions, R-groups  and preferred embodiments
  MOD_RES (9)..(9): Any L- or D-natural amino acid and any non-natural amino acid; see  specification as filed for detail ed description of substitutions, R-groups  and preferred embodiments
  MOD_RES (11)..(11): Any L- or D-natural amino acid and any non-natural amino acid; see  specification as filed for detail ed description of substitutions, R-groups  and preferred embodiments
  MOD_RES (16)..(19): Any L- or D-natural or non-natural amino acid, and this range may  encompass 1 or 4 residues; see spe cification as filed for detailed  description of substitutions, R-groups and preferred embodi
  c-term may be amidated
SAKELRXQXIXTYSKXXXXNWVQRVVEKFLKRAEN

SEQ ID NO: 37 - protein, 35 aa, Artificial Sequence
  Description of Artificial Sequence: Synthetic peptide
  MOD_RES (1)..(1): Any L- or D-natural amino acid and any non-natural amino acid; see  specification as filed for detail ed description of substitutions, R-groups  and preferred embodiments
  MOD_RES (7)..(7): Any L- or D-natural amino acid and any non-natural amino acid; see  specification as filed for detail ed description of substitutions, R-groups  and preferred embodiments
  MOD_RES (9)..(9): Any L- or D-natural amino acid and any non-natural amino acid; see  specification as filed for detail ed description of substitutions, R-groups  and preferred embodiments
  MOD_RES (11)..(11): Any L- or D-natural amino acid and any non-natural amino acid; see  specification as filed for detail ed description of substitutions, R-groups  and preferred embodiments
  MOD_RES (16)..(19): Any L- or D-natural or non-natural amino acid, and this range may  encompass 1 or 4 residues; see spe cification as filed for detailed  description of substitutions, R-groups and preferred embodi
  c-term may be amidated
XAKELRXQXIXTYSKXXXXNWVQRVVEKFLKRAEN

SEQ ID NO: 38 - protein, 35 aa, Artificial Sequence
  Description of Artificial Sequence: Synthetic peptide
  MOD_RES (2)..(2): Any L- or D-natural amino acid and any non-natural amino acid; see  specification as filed for detail ed description of substitutions, R-groups  and preferred embodiments
  MOD_RES (7)..(7): Any L- or D-natural amino acid and any non-natural amino acid; see  specification as filed for detail ed description of substitutions, R-groups  and preferred embodiments
  MOD_RES (9)..(9): Any L- or D-natural amino acid and any non-natural amino acid; see  specification as filed for detail ed description of substitutions, R-groups  and preferred embodiments
  MOD_RES (11)..(11): Any L- or D-natural amino acid and any non-natural amino acid; see  specification as filed for detail ed description of substitutions, R-groups  and preferred embodiments
  MOD_RES (16)..(19): Any L- or D-natural or non-natural amino acid, and this range may  encompass 1 or 4 residues; see spe cification as filed for detailed  description of substitutions, R-groups and preferred embodi
  c-term may be amidated
SXKELRXQXIXTYSKXXXXNWVQRVVEKFLKRAEN

SEQ ID NO: 39 - protein, 35 aa, Artificial Sequence
  Description of Artificial Sequence: Synthetic peptide
  MOD_RES (3)..(3): Any L- or D-natural amino acid and any non-natural amino acid; see  specification as filed for detail ed description of substitutions, R-groups  and preferred embodiments
  MOD_RES (7)..(7): Any L- or D-natural amino acid and any non-natural amino acid; see  specification as filed for detail ed description of substitutions, R-groups  and preferred embodiments
  MOD_RES (9)..(9): Any L- or D-natural amino acid and any non-natural amino acid; see  specification as filed for detail ed description of substitutions, R-groups  and preferred embodiments
  MOD_RES (11)..(11): Any L- or D-natural amino acid and any non-natural amino acid; see  specification as filed for detail ed description of substitutions, R-groups  and preferred embodiments
  MOD_RES (16)..(19): Any L- or D-natural or non-natural amino acid, and this range may  encompass 1 or 4 residues; see spe cification as filed for detailed  description of substitutions, R-groups and preferred embodi
  c-term may be amidated
SAXELRXQXIXTYSKXXXXNWVQRVVEKFLKRAEN

SEQ ID NO: 40 - protein, 35 aa, Artificial Sequence
  Description of Artificial Sequence: Synthetic peptide
  MOD_RES (7)..(7): Any L- or D-natural amino acid and any non-natural amino acid; see  specification as filed for detail ed description of substitutions, R-groups  and preferred embodiments
  MOD_RES (9)..(9): Any L- or D-natural amino acid and any non-natural amino acid; see  specification as filed for detail ed description of substitutions, R-groups  and preferred embodiments
  MOD_RES (12)..(12): Any L- or D-natural amino acid and any non-natural amino acid; see  specification as filed for detail ed description of substitutions, R-groups  and preferred embodiments
  MOD_RES (16)..(19): Any L- or D-natural or non-natural amino acid, and this range may  encompass 1 or 4 residues; see spe cification as filed for detailed  description of substitutions, R-groups and preferred embodi
  c-term may be amidated
SAKELRXQXIKXYSKXXXXNWVQRVVEKFLKRAEN

SEQ ID NO: 41 - protein, 35 aa, Artificial Sequence
  Description of Artificial Sequence: Synthetic peptide
  MOD_RES (1)..(1): Any L- or D-natural amino acid and any non-natural amino acid; see  specification as filed for detail ed description of substitutions, R-groups  and preferred embodiments
  MOD_RES (7)..(7): Any L- or D-natural amino acid and any non-natural amino acid; see  specification as filed for detail ed description of substitutions, R-groups  and preferred embodiments
  MOD_RES (9)..(9): Any L- or D-natural amino acid and any non-natural amino acid; see  specification as filed for detail ed description of substitutions, R-groups  and preferred embodiments
  MOD_RES (12)..(12): Any L- or D-natural amino acid and any non-natural amino acid; see  specification as filed for detail ed description of substitutions, R-groups  and preferred embodiments
  MOD_RES (16)..(19): Any L- or D-natural or non-natural amino acid, and this range may  encompass 1 or 4 residues; see spe cification as filed for detailed  description of substitutions, R-groups and preferred embodi
  c-term may be amidated
XAKELRXQXIKXYSKXXXXNWVQRVVEKFLKRAEN

SEQ ID NO: 42 - protein, 35 aa, Artificial Sequence
  Description of Artificial Sequence: Synthetic peptide
  MOD_RES (2)..(2): Any L- or D-natural amino acid and any non-natural amino acid; see  specification as filed for detail ed description of substitutions, R-groups  and preferred embodiments
  MOD_RES (7)..(7): Any L- or D-natural amino acid and any non-natural amino acid; see  specification as filed for detail ed description of substitutions, R-groups  and preferred embodiments
  MOD_RES (9)..(9): Any L- or D-natural amino acid and any non-natural amino acid; see  specification as filed for detail ed description of substitutions, R-groups  and preferred embodiments
  MOD_RES (12)..(12): Any L- or D-natural amino acid and any non-natural amino acid; see  specification as filed for detail ed description of substitutions, R-groups  and preferred embodiments
  MOD_RES (16)..(19): Any L- or D-natural or non-natural amino acid, and this range may  encompass 1 or 4 residues; see spe cification as filed for detailed  description of substitutions, R-groups and preferred embodi
  c-term may be amidated
SXKELRXQXIKXYSKXXXXNWVQRVVEKFLKRAEN

SEQ ID NO: 43 - protein, 35 aa, Artificial Sequence
  Description of Artificial Sequence: Synthetic peptide
  MOD_RES (3)..(3): Any L- or D-natural amino acid and any non-natural amino acid; see  specification as filed for detail ed description of substitutions, R-groups  and preferred embodiments
  MOD_RES (7)..(7): Any L- or D-natural amino acid and any non-natural amino acid; see  specification as filed for detail ed description of substitutions, R-groups  and preferred embodiments
  MOD_RES (9)..(9): Any L- or D-natural amino acid and any non-natural amino acid; see  specification as filed for detail ed description of substitutions, R-groups  and preferred embodiments
  MOD_RES (12)..(12): Any L- or D-natural amino acid and any non-natural amino acid; see  specification as filed for detail ed description of substitutions, R-groups  and preferred embodiments
  MOD_RES (16)..(19): Any L- or D-natural or non-natural amino acid, and this range may  encompass 1 or 4 residues; see spe cification as filed for detailed  description of substitutions, R-groups and preferred embodi
  c-term may be amidated
SAXELRXQXIKXYSKXXXXNWVQRVVEKFLKRAEN

SEQ ID NO: 44 - protein, 35 aa, Artificial Sequence
  Description of Artificial Sequence: Synthetic peptide
  MOD_RES (7)..(7): Any L- or D-natural amino acid and any non-natural amino acid; see  specification as filed for detail ed description of substitutions, R-groups  and preferred embodiments
  MOD_RES (9)..(9): Any L- or D-natural amino acid and any non-natural amino acid; see  specification as filed for detail ed description of substitutions, R-groups  and preferred embodiments
  MOD_RES (13)..(13): Any L- or D-natural amino acid and any non-natural amino acid; see  specification as filed for detail ed description of substitutions, R-groups  and preferred embodiments
  MOD_RES (16)..(19): Any L- or D-natural or non-natural amino acid, and this range may  encompass 1 or 4 residues; see spe cification as filed for detailed  description of substitutions, R-groups and preferred embodi
  c-term may be amidated
SAKELRXQXIKTXSKXXXXNWVQRVVEKFLKRAEN

SEQ ID NO: 45 - protein, 35 aa, Artificial Sequence
  Description of Artificial Sequence: Synthetic peptide
  MOD_RES (1)..(1): Any L- or D-natural amino acid and any non-natural amino acid; see  specification as filed for detail ed description of substitutions, R-groups  and preferred embodiments
  MOD_RES (7)..(7): Any L- or D-natural amino acid and any non-natural amino acid; see  specification as filed for detail ed description of substitutions, R-groups  and preferred embodiments
  MOD_RES (9)..(9): Any L- or D-natural amino acid and any non-natural amino acid; see  specification as filed for detail ed description of substitutions, R-groups  and preferred embodiments
  MOD_RES (13)..(13): Any L- or D-natural amino acid and any non-natural amino acid; see  specification as filed for detail ed description of substitutions, R-groups  and preferred embodiments
  MOD_RES (16)..(19): Any L- or D-natural or non-natural amino acid, and this range may  encompass 1 or 4 residues; see spe cification as filed for detailed  description of substitutions, R-groups and preferred embodi
  c-term may be amidated
XAKELRXQXIKTXSKXXXXNWVQRVVEKFLKRAEN

SEQ ID NO: 46 - protein, 35 aa, Artificial Sequence
  Description of Artificial Sequence: Synthetic peptide
  MOD_RES (2)..(2): Any L- or D-natural amino acid and any non-natural amino acid; see  specification as filed for detail ed description of substitutions, R-groups  and preferred embodiments
  MOD_RES (7)..(7): Any L- or D-natural amino acid and any non-natural amino acid; see  specification as filed for detail ed description of substitutions, R-groups  and preferred embodiments
  MOD_RES (9)..(9): Any L- or D-natural amino acid and any non-natural amino acid; see  specification as filed for detail ed description of substitutions, R-groups  and preferred embodiments
  MOD_RES (13)..(13): Any L- or D-natural amino acid and any non-natural amino acid; see  specification as filed for detail ed description of substitutions, R-groups  and preferred embodiments
  MOD_RES (16)..(19): Any L- or D-natural or non-natural amino acid, and this range may  encompass 1 or 4 residues; see spe cification as filed for detailed  description of substitutions, R-groups and preferred embodi
  c-term may be amidated
SXKELRXQXIKTXSKXXXXNWVQRVVEKFLKRAEN

SEQ ID NO: 47 - protein, 35 aa, Artificial Sequence
  Description of Artificial Sequence: Synthetic peptide
  MOD_RES (3)..(3): Any L- or D-natural amino acid and any non-natural amino acid; see  specification as filed for detail ed description of substitutions, R-groups  and preferred embodiments
  MOD_RES (7)..(7): Any L- or D-natural amino acid and any non-natural amino acid; see  specification as filed for detail ed description of substitutions, R-groups  and preferred embodiments
  MOD_RES (9)..(9): Any L- or D-natural amino acid and any non-natural amino acid; see  specification as filed for detail ed description of substitutions, R-groups  and preferred embodiments
  MOD_RES (13)..(13): Any L- or D-natural amino acid and any non-natural amino acid; see  specification as filed for detail ed description of substitutions, R-groups  and preferred embodiments
  MOD_RES (16)..(19): Any L- or D-natural or non-natural amino acid, and this range may  encompass 1 or 4 residues; see spe cification as filed for detailed  description of substitutions, R-groups and preferred embodi
  c-term may be amidated
SAXELRXQXIKTXSKXXXXNWVQRVVEKFLKRAEN

SEQ ID NO: 48 - protein, 35 aa, Artificial Sequence
  Description of Artificial Sequence: Synthetic peptide
  MOD_RES (7)..(7): Any L- or D-natural amino acid and any non-natural amino acid; see  specification as filed for detail ed description of substitutions, R-groups  and preferred embodiments
  MOD_RES (9)..(9): Any L- or D-natural amino acid and any non-natural amino acid; see  specification as filed for detail ed description of substitutions, R-groups  and preferred embodiments
  MOD_RES (14)..(14): Any L- or D-natural amino acid and any non-natural amino acid; see  specification as filed for detail ed description of substitutions, R-groups  and preferred embodiments
  MOD_RES (16)..(19): Any L- or D-natural or non-natural amino acid, and this range may  encompass 1 or 4 residues; see spe cification as filed for detailed  description of substitutions, R-groups and preferred embodi
  c-term may be amidated
SAKELRXQXIKTYXKXXXXNWVQRVVEKFLKRAEN

SEQ ID NO: 49 - protein, 35 aa, Artificial Sequence
  Description of Artificial Sequence: Synthetic peptide
  MOD_RES (1)..(1): Any L- or D-natural amino acid and any non-natural amino acid; see  specification as filed for detail ed description of substitutions, R-groups  and preferred embodiments
  MOD_RES (7)..(7): Any L- or D-natural amino acid and any non-natural amino acid; see  specification as filed for detail ed description of substitutions, R-groups  and preferred embodiments
  MOD_RES (9)..(9): Any L- or D-natural amino acid and any non-natural amino acid; see  specification as filed for detail ed description of substitutions, R-groups  and preferred embodiments
  MOD_RES (14)..(14): Any L- or D-natural amino acid and any non-natural amino acid; see  specification as filed for detail ed description of substitutions, R-groups  and preferred embodiments
  MOD_RES (16)..(19): Any L- or D-natural or non-natural amino acid, and this range may  encompass 1 or 4 residues; see spe cification as filed for detailed  description of substitutions, R-groups and preferred embodi
  c-term may be amidated
XAKELRXQXIKTYXKXXXXNWVQRVVEKFLKRAEN

SEQ ID NO: 50 - protein, 35 aa, Artificial Sequence
  Description of Artificial Sequence: Synthetic peptide
  MOD_RES (2)..(2): Any L- or D-natural amino acid and any non-natural amino acid; see  specification as filed for detail ed description of substitutions, R-groups  and preferred embodiments
  MOD_RES (7)..(7): Any L- or D-natural amino acid and any non-natural amino acid; see  specification as filed for detail ed description of substitutions, R-groups  and preferred embodiments
  MOD_RES (9)..(9): Any L- or D-natural amino acid and any non-natural amino acid; see  specification as filed for detail ed description of substitutions, R-groups  and preferred embodiments
  MOD_RES (14)..(14): Any L- or D-natural amino acid and any non-natural amino acid; see  specification as filed for detail ed description of substitutions, R-groups  and preferred embodiments
  MOD_RES (16)..(19): Any L- or D-natural or non-natural amino acid, and this range may  encompass 1 or 4 residues; see spe cification as filed for detailed  description of substitutions, R-groups and preferred embodi
  c-term may be amidated
SXKELRXQXIKTYXKXXXXNWVQRVVEKFLKRAEN

SEQ ID NO: 51 - protein, 35 aa, Artificial Sequence
  Description of Artificial Sequence: Synthetic peptide
  MOD_RES (3)..(3): Any L- or D-natural amino acid and any non-natural amino acid; see  specification as filed for detail ed description of substitutions, R-groups  and preferred embodiments
  MOD_RES (7)..(7): Any L- or D-natural amino acid and any non-natural amino acid; see  specification as filed for detail ed description of substitutions, R-groups  and preferred embodiments
  MOD_RES (9)..(9): Any L- or D-natural amino acid and any non-natural amino acid; see  specification as filed for detail ed description of substitutions, R-groups  and preferred embodiments
  MOD_RES (14)..(14): Any L- or D-natural amino acid and any non-natural amino acid; see  specification as filed for detail ed description of substitutions, R-groups  and preferred embodiments
  MOD_RES (16)..(19): Any L- or D-natural or non-natural amino acid, and this range may  encompass 1 or 4 residues; see spe cification as filed for detailed  description of substitutions, R-groups and preferred embodi
  c-term may be amidated
SAXELRXQXIKTYXKXXXXNWVQRVVEKFLKRAEN

SEQ ID NO: 52 - protein, 35 aa, Artificial Sequence
  Description of Artificial Sequence: Synthetic peptide
  MOD_RES (7)..(7): Any L- or D-natural amino acid and any non-natural amino acid; see  specification as filed for detail ed description of substitutions, R-groups  and preferred embodiments
  MOD_RES (9)..(9): Any L- or D-natural amino acid and any non-natural amino acid; see  specification as filed for detail ed description of substitutions, R-groups  and preferred embodiments
  MOD_RES (15)..(15): Any L- or D-natural amino acid and any non-natural amino acid; see  specification as filed for detail ed description of substitutions, R-groups  and preferred embodiments
  MOD_RES (16)..(19): Any L- or D-natural or non-natural amino acid, and this range may  encompass 1 or 4 residues; see spe cification as filed for detailed  description of substitutions, R-groups and preferred embodi
  c-term may be amidated
SAKELRXQXIKTYSXXXXXNWVQRVVEKFLKRAEN

SEQ ID NO: 53 - protein, 35 aa, Artificial Sequence
  Description of Artificial Sequence: Synthetic peptide
  MOD_RES (1)..(1): Any L- or D-natural amino acid and any non-natural amino acid; see  specification as filed for detail ed description of substitutions, R-groups  and preferred embodiments
  MOD_RES (7)..(7): Any L- or D-natural amino acid and any non-natural amino acid; see  specification as filed for detail ed description of substitutions, R-groups  and preferred embodiments
  MOD_RES (9)..(9): Any L- or D-natural amino acid and any non-natural amino acid; see  specification as filed for detail ed description of substitutions, R-groups  and preferred embodiments
  MOD_RES (15)..(15): Any L- or D-natural amino acid and any non-natural amino acid; see  specification as filed for detail ed description of substitutions, R-groups  and preferred embodiments
  MOD_RES (16)..(19): Any L- or D-natural or non-natural amino acid, and this range may  encompass 1 or 4 residues; see spe cification as filed for detailed  description of substitutions, R-groups and preferred embodi
  c-term may be amidated
XAKELRXQXIKTYSXXXXXNWVQRVVEKFLKRAEN

SEQ ID NO: 54 - protein, 35 aa, Artificial Sequence
  Description of Artificial Sequence: Synthetic peptide
  MOD_RES (2)..(2): Any L- or D-natural amino acid and any non-natural amino acid; see  specification as filed for detail ed description of substitutions, R-groups  and preferred embodiments
  MOD_RES (7)..(7): Any L- or D-natural amino acid and any non-natural amino acid; see  specification as filed for detail ed description of substitutions, R-groups  and preferred embodiments
  MOD_RES (9)..(9): Any L- or D-natural amino acid and any non-natural amino acid; see  specification as filed for detail ed description of substitutions, R-groups  and preferred embodiments
  MOD_RES (15)..(15): Any L- or D-natural amino acid and any non-natural amino acid; see  specification as filed for detail ed description of substitutions, R-groups  and preferred embodiments
  MOD_RES (16)..(19): Any L- or D-natural or non-natural amino acid, and this range may  encompass 1 or 4 residues; see spe cification as filed for detailed  description of substitutions, R-groups and preferred embodi
  c-term may be amidated
SXKELRXQXIKTYSXXXXXNWVQRVVEKFLKRAEN

SEQ ID NO: 55 - protein, 35 aa, Artificial Sequence
  Description of Artificial Sequence: Synthetic peptide
  MOD_RES (3)..(3): Any L- or D-natural amino acid and any non-natural amino acid; see  specification as filed for detail ed description of substitutions, R-groups  and preferred embodiments
  MOD_RES (7)..(7): Any L- or D-natural amino acid and any non-natural amino acid; see  specification as filed for detail ed description of substitutions, R-groups  and preferred embodiments
  MOD_RES (9)..(9): Any L- or D-natural amino acid and any non-natural amino acid; see  specification as filed for detail ed description of substitutions, R-groups  and preferred embodiments
  MOD_RES (15)..(15): Any L- or D-natural amino acid and any non-natural amino acid; see  specification as filed for detail ed description of substitutions, R-groups  and preferred embodiments
  MOD_RES (16)..(19): Any L- or D-natural or non-natural amino acid, and this range may  encompass 1 or 4 residues; see spe cification as filed for detailed  description of substitutions, R-groups and preferred embodi
  c-term may be amidated
SAXELRXQXIKTYSXXXXXNWVQRVVEKFLKRAEN

SEQ ID NO: 56 - protein, 33 aa, Artificial Sequence
  Description of Artificial Sequence: Synthetic peptide
  MOD_RES (14)..(17): Any L- or D-natural or non-natural amino acid, and this range may  encompass 1 or 4 residues; see spe cification as filed for detailed  description of substitutions, R-groups and preferred embodi
  c-term may be amidated
SAKELRCQCIKTYXXXXNWVQRVVEKFLKRAEN

SEQ ID NO: 57 - protein, 33 aa, Artificial Sequence
  Description of Artificial Sequence: Synthetic peptide
  MOD_RES (7)..(7): Any L- or D-natural amino acid and any non-natural amino acid; see  specification as filed for detail ed description of substitutions, R-groups  and preferred embodiments
  MOD_RES (9)..(9): Any L- or D-natural amino acid and any non-natural amino acid; see  specification as filed for detail ed description of substitutions, R-groups  and preferred embodiments
  MOD_RES (14)..(17): Any L- or D-natural or non-natural amino acid, and this range may  encompass 1 or 4 residues; see spe cification as filed for detailed  description of substitutions, R-groups and preferred embodi
  c-term may be amidated
SAKELRXQXIKTYXXXXNWVQRVVEKFLKRAEN

SEQ ID NO: 58 - protein, 33 aa, Artificial Sequence
  Description of Artificial Sequence: Synthetic peptide
  MOD_RES (1)..(1): Any L- or D-natural amino acid and any non-natural amino acid; see  specification as filed for detail ed description of substitutions, R-groups  and preferred embodiments
  MOD_RES (7)..(7): Any L- or D-natural amino acid and any non-natural amino acid; see  specification as filed for detail ed description of substitutions, R-groups  and preferred embodiments
  MOD_RES (9)..(9): Any L- or D-natural amino acid and any non-natural amino acid; see  specification as filed for detail ed description of substitutions, R-groups  and preferred embodiments
  MOD_RES (14)..(17): Any L- or D-natural or non-natural amino acid, and this range may  encompass 1 or 4 residues; see spe cification as filed for detailed  description of substitutions, R-groups and preferred embodi
  c-term may be amidated
XAKELRXQXIKTYXXXXNWVQRVVEKFLKRAEN

SEQ ID NO: 59 - protein, 33 aa, Artificial Sequence
  Description of Artificial Sequence: Synthetic peptide
  MOD_RES (2)..(2): Any L- or D-natural amino acid and any non-natural amino acid; see  specification as filed for detail ed description of substitutions, R-groups  and preferred embodiments
  MOD_RES (7)..(7): Any L- or D-natural amino acid and any non-natural amino acid; see  specification as filed for detail ed description of substitutions, R-groups  and preferred embodiments
  MOD_RES (9)..(9): Any L- or D-natural amino acid and any non-natural amino acid; see  specification as filed for detail ed description of substitutions, R-groups  and preferred embodiments
  MOD_RES (14)..(17): Any L- or D-natural or non-natural amino acid, and this range may  encompass 1 or 4 residues; see spe cification as filed for detailed  description of substitutions, R-groups and preferred embodi
  c-term may be amidated
SXKELRXQXIKTYXXXXNWVQRVVEKFLKRAEN

SEQ ID NO: 60 - protein, 33 aa, Artificial Sequence
  Description of Artificial Sequence: Synthetic peptide
  MOD_RES (3)..(3): Any L- or D-natural amino acid and any non-natural amino acid; see  specification as filed for detail ed description of substitutions, R-groups  and preferred embodiments
  MOD_RES (7)..(7): Any L- or D-natural amino acid and any non-natural amino acid; see  specification as filed for detail ed description of substitutions, R-groups  and preferred embodiments
  MOD_RES (9)..(9): Any L- or D-natural amino acid and any non-natural amino acid; see  specification as filed for detail ed description of substitutions, R-groups  and preferred embodiments
  MOD_RES (14)..(17): Any L- or D-natural or non-natural amino acid, and this range may  encompass 1 or 4 residues; see spe cification as filed for detailed  description of substitutions, R-groups and preferred embodi
  c-term may be amidated
SAXELRXQXIKTYXXXXNWVQRVVEKFLKRAEN

SEQ ID NO: 61 - protein, 33 aa, Artificial Sequence
  Description of Artificial Sequence: Synthetic peptide
  MOD_RES (7)..(7): Any L- or D-natural amino acid and any non-natural amino acid; see  specification as filed for detail ed description of substitutions, R-groups  and preferred embodiments
  MOD_RES (9)..(10): Any L- or D-natural amino acid and any non-natural amino acid; see  specification as filed for detail ed description of substitutions, R-groups  and preferred embodiments
  MOD_RES (14)..(17): Any L- or D-natural or non-natural amino acid, and this range may  encompass 1 or 4 residues; see spe cification as filed for detailed  description of substitutions, R-groups and preferred embodi
  c-term may be amidated
SAKELRXQXXKTYXXXXNWVQRVVEKFLKRAEN

SEQ ID NO: 62 - protein, 33 aa, Artificial Sequence
  Description of Artificial Sequence: Synthetic peptide
  MOD_RES (1)..(1): Any L- or D-natural amino acid and any non-natural amino acid; see  specification as filed for detail ed description of substitutions, R-groups  and preferred embodiments
  MOD_RES (7)..(7): Any L- or D-natural amino acid and any non-natural amino acid; see  specification as filed for detail ed description of substitutions, R-groups  and preferred embodiments
  MOD_RES (9)..(10): Any L- or D-natural amino acid and any non-natural amino acid; see  specification as filed for detail ed description of substitutions, R-groups  and preferred embodiments
  MOD_RES (14)..(17): Any L- or D-natural or non-natural amino acid, and this range may  encompass 1 or 4 residues; see spe cification as filed for detailed  description of substitutions, R-groups and preferred embodi
  c-term may be amidated
XAKELRXQXXKTYXXXXNWVQRVVEKFLKRAEN

SEQ ID NO: 63 - protein, 33 aa, Artificial Sequence
  Description of Artificial Sequence: Synthetic peptide
  MOD_RES (2)..(2): Any L- or D-natural amino acid and any non-natural amino acid; see  specification as filed for detail ed description of substitutions, R-groups  and preferred embodiments
  MOD_RES (7)..(7): Any L- or D-natural amino acid and any non-natural amino acid; see  specification as filed for detail ed description of substitutions, R-groups  and preferred embodiments
  MOD_RES (9)..(10): Any L- or D-natural amino acid and any non-natural amino acid; see  specification as filed for detail ed description of substitutions, R-groups  and preferred embodiments
  MOD_RES (14)..(17): Any L- or D-natural or non-natural amino acid, and this range may  encompass 1 or 4 residues; see spe cification as filed for detailed  description of substitutions, R-groups and preferred embodi
  c-term may be amidated
SXKELRXQXXKTYXXXXNWVQRVVEKFLKRAEN

SEQ ID NO: 64 - protein, 33 aa, Artificial Sequence
  Description of Artificial Sequence: Synthetic peptide
  MOD_RES (3)..(3): Any L- or D-natural amino acid and any non-natural amino acid; see  specification as filed for detail ed description of substitutions, R-groups  and preferred embodiments
  MOD_RES (7)..(7): Any L- or D-natural amino acid and any non-natural amino acid; see  specification as filed for detail ed description of substitutions, R-groups  and preferred embodiments
  MOD_RES (9)..(10): Any L- or D-natural amino acid and any non-natural amino acid; see  specification as filed for detail ed description of substitutions, R-groups  and preferred embodiments
  MOD_RES (14)..(17): Any L- or D-natural or non-natural amino acid, and this range may  encompass 1 or 4 residues; see spe cification as filed for detailed  description of substitutions, R-groups and preferred embodi
  c-term may be amidated
SAXELRXQXXKTYXXXXNWVQRVVEKFLKRAEN

SEQ ID NO: 65 - protein, 33 aa, Artificial Sequence
  Description of Artificial Sequence: Synthetic peptide
  MOD_RES (7)..(7): Any L- or D-natural amino acid and any non-natural amino acid; see  specification as filed for detail ed description of substitutions, R-groups  and preferred embodiments
  MOD_RES (9)..(9): Any L- or D-natural amino acid and any non-natural amino acid; see  specification as filed for detail ed description of substitutions, R-groups  and preferred embodiments
  MOD_RES (11)..(11): Any L- or D-natural amino acid and any non-natural amino acid; see  specification as filed for detail ed description of substitutions, R-groups  and preferred embodiments
  MOD_RES (14)..(17): Any L- or D-natural or non-natural amino acid, and this range may  encompass 1 or 4 residues; see spe cification as filed for detailed  description of substitutions, R-groups and preferred embodi
  c-term may be amidated
SAKELRXQXIXTYXXXXNWVQRVVEKFLKRAEN

SEQ ID NO: 66 - protein, 33 aa, Artificial Sequence
  Description of Artificial Sequence: Synthetic peptide
  MOD_RES (1)..(1): Any L- or D-natural amino acid and any non-natural amino acid; see  specification as filed for detail ed description of substitutions, R-groups  and preferred embodiments
  MOD_RES (7)..(7): Any L- or D-natural amino acid and any non-natural amino acid; see  specification as filed for detail ed description of substitutions, R-groups  and preferred embodiments
  MOD_RES (9)..(9): Any L- or D-natural amino acid and any non-natural amino acid; see  specification as filed for detail ed description of substitutions, R-groups  and preferred embodiments
  MOD_RES (11)..(11): Any L- or D-natural amino acid and any non-natural amino acid; see  specification as filed for detail ed description of substitutions, R-groups  and preferred embodiments
  MOD_RES (14)..(17): Any L- or D-natural or non-natural amino acid, and this range may  encompass 1 or 4 residues; see spe cification as filed for detailed  description of substitutions, R-groups and preferred embodi
  c-term may be amidated
XAKELRXQXIXTYXXXXNWVQRVVEKFLKRAEN

SEQ ID NO: 67 - protein, 33 aa, Artificial Sequence
  Description of Artificial Sequence: Synthetic peptide
  MOD_RES (2)..(2): Any L- or D-natural amino acid and any non-natural amino acid; see  specification as filed for detail ed description of substitutions, R-groups  and preferred embodiments
  MOD_RES (7)..(7): Any L- or D-natural amino acid and any non-natural amino acid; see  specification as filed for detail ed description of substitutions, R-groups  and preferred embodiments
  MOD_RES (9)..(9): Any L- or D-natural amino acid and any non-natural amino acid; see  specification as filed for detail ed description of substitutions, R-groups  and preferred embodiments
  MOD_RES (11)..(11): Any L- or D-natural amino acid and any non-natural amino acid; see  specification as filed for detail ed description of substitutions, R-groups  and preferred embodiments
  MOD_RES (14)..(17): Any L- or D-natural or non-natural amino acid, and this range may  encompass 1 or 4 residues; see spe cification as filed for detailed  description of substitutions, R-groups and preferred embodi
  c-term may be amidated
SXKELRXQXIXTYXXXXNWVQRVVEKFLKRAEN

SEQ ID NO: 68 - protein, 33 aa, Artificial Sequence
  Description of Artificial Sequence: Synthetic peptide
  MOD_RES (3)..(3): Any L- or D-natural amino acid and any non-natural amino acid; see  specification as filed for detail ed description of substitutions, R-groups  and preferred embodiments
  MOD_RES (7)..(7): Any L- or D-natural amino acid and any non-natural amino acid; see  specification as filed for detail ed description of substitutions, R-groups  and preferred embodiments
  MOD_RES (9)..(9): Any L- or D-natural amino acid and any non-natural amino acid; see  specification as filed for detail ed description of substitutions, R-groups  and preferred embodiments
  MOD_RES (11)..(11): Any L- or D-natural amino acid and any non-natural amino acid; see  specification as filed for detail ed description of substitutions, R-groups  and preferred embodiments
  MOD_RES (14)..(17): Any L- or D-natural or non-natural amino acid, and this range may  encompass 1 or 4 residues; see spe cification as filed for detailed  description of substitutions, R-groups and preferred embodi
  c-term may be amidated
SAXELRXQXIXTYXXXXNWVQRVVEKFLKRAEN

SEQ ID NO: 69 - protein, 33 aa, Artificial Sequence
  Description of Artificial Sequence: Synthetic peptide
  MOD_RES (7)..(7): Any L- or D-natural amino acid and any non-natural amino acid; see  specification as filed for detail ed description of substitutions, R-groups  and preferred embodiments
  MOD_RES (9)..(9): Any L- or D-natural amino acid and any non-natural amino acid; see  specification as filed for detail ed description of substitutions, R-groups  and preferred embodiments
  MOD_RES (12)..(12): Any L- or D-natural amino acid and any non-natural amino acid; see  specification as filed for detail ed description of substitutions, R-groups  and preferred embodiments
  MOD_RES (14)..(17): Any L- or D-natural or non-natural amino acid, and this range may  encompass 1 or 4 residues; see spe cification as filed for detailed  description of substitutions, R-groups and preferred embodi
  c-term may be amidated
SAKELRXQXIKXYXXXXNWVQRVVEKFLKRAEN

SEQ ID NO: 70 - protein, 33 aa, Artificial Sequence
  Description of Artificial Sequence: Synthetic peptide
  MOD_RES (1)..(1): Any L- or D-natural amino acid and any non-natural amino acid; see  specification as filed for detail ed description of substitutions, R-groups  and preferred embodiments
  MOD_RES (7)..(7): Any L- or D-natural amino acid and any non-natural amino acid; see  specification as filed for detail ed description of substitutions, R-groups  and preferred embodiments
  MOD_RES (9)..(9): Any L- or D-natural amino acid and any non-natural amino acid; see  specification as filed for detail ed description of substitutions, R-groups  and preferred embodiments
  MOD_RES (12)..(12): Any L- or D-natural amino acid and any non-natural amino acid; see  specification as filed for detail ed description of substitutions, R-groups  and preferred embodiments
  MOD_RES (14)..(17): Any L- or D-natural or non-natural amino acid, and this range may  encompass 1 or 4 residues; see spe cification as filed for detailed  description of substitutions, R-groups and preferred embodi
  c-term may be amidated
XAKELRXQXIKXYXXXXNWVQRVVEKFLKRAEN

SEQ ID NO: 71 - protein, 33 aa, Artificial Sequence
  Description of Artificial Sequence: Synthetic peptide
  MOD_RES (2)..(2): Any L- or D-natural amino acid and any non-natural amino acid; see  specification as filed for detail ed description of substitutions, R-groups  and preferred embodiments
  MOD_RES (7)..(7): Any L- or D-natural amino acid and any non-natural amino acid; see  specification as filed for detail ed description of substitutions, R-groups  and preferred embodiments
  MOD_RES (9)..(9): Any L- or D-natural amino acid and any non-natural amino acid; see  specification as filed for detail ed description of substitutions, R-groups  and preferred embodiments
  MOD_RES (12)..(12): Any L- or D-natural amino acid and any non-natural amino acid; see  specification as filed for detail ed description of substitutions, R-groups  and preferred embodiments
  MOD_RES (14)..(17): Any L- or D-natural or non-natural amino acid, and this range may  encompass 1 or 4 residues; see spe cification as filed for detailed  description of substitutions, R-groups and preferred embodi
  c-term may be amidated
SXKELRXQXIKXYXXXXNWVQRVVEKFLKRAEN

SEQ ID NO: 72 - protein, 33 aa, Artificial Sequence
  Description of Artificial Sequence: Synthetic peptide
  MOD_RES (3)..(3): Any L- or D-natural amino acid and any non-natural amino acid; see  specification as filed for detail ed description of substitutions, R-groups  and preferred embodiments
  MOD_RES (7)..(7): Any L- or D-natural amino acid and any non-natural amino acid; see  specification as filed for detail ed description of substitutions, R-groups  and preferred embodiments
  MOD_RES (9)..(9): Any L- or D-natural amino acid and any non-natural amino acid; see  specification as filed for detail ed description of substitutions, R-groups  and preferred embodiments
  MOD_RES (12)..(12): Any L- or D-natural amino acid and any non-natural amino acid; see  specification as filed for detail ed description of substitutions, R-groups  and preferred embodiments
  MOD_RES (14)..(17): Any L- or D-natural or non-natural amino acid, and this range may  encompass 1 or 4 residues; see spe cification as filed for detailed  description of substitutions, R-groups and preferred embodi
  c-term may be amidated
SAXELRXQXIKXYXXXXNWVQRVVEKFLKRAEN

SEQ ID NO: 73 - protein, 33 aa, Artificial Sequence
  Description of Artificial Sequence: Synthetic peptide
  MOD_RES (7)..(7): Any L- or D-natural amino acid and any non-natural amino acid; see  specification as filed for detail ed description of substitutions, R-groups  and preferred embodiments
  MOD_RES (9)..(9): Any L- or D-natural amino acid and any non-natural amino acid; see  specification as filed for detail ed description of substitutions, R-groups  and preferred embodiments
  MOD_RES (13)..(13): Any L- or D-natural amino acid and any non-natural amino acid; see  specification as filed for detail ed description of substitutions, R-groups  and preferred embodiments
  MOD_RES (14)..(17): Any L- or D-natural or non-natural amino acid, and this range may  encompass 1 or 4 residues; see spe cification as filed for detailed  description of substitutions, R-groups and preferred embodi
  c-term may be amidated
SAKELRXQXIKTXXXXXNWVQRVVEKFLKRAEN

SEQ ID NO: 74 - protein, 33 aa, Artificial Sequence
  Description of Artificial Sequence: Synthetic peptide
  MOD_RES (1)..(1): Any L- or D-natural amino acid and any non-natural amino acid; see  specification as filed for detail ed description of substitutions, R-groups  and preferred embodiments
  MOD_RES (7)..(7): Any L- or D-natural amino acid and any non-natural amino acid; see  specification as filed for detail ed description of substitutions, R-groups  and preferred embodiments
  MOD_RES (9)..(9): Any L- or D-natural amino acid and any non-natural amino acid; see  specification as filed for detail ed description of substitutions, R-groups  and preferred embodiments
  MOD_RES (13)..(13): Any L- or D-natural amino acid and any non-natural amino acid; see  specification as filed for detail ed description of substitutions, R-groups  and preferred embodiments
  MOD_RES (14)..(17): Any L- or D-natural or non-natural amino acid, and this range may  encompass 1 or 4 residues; see spe cification as filed for detailed  description of substitutions, R-groups and preferred embodi
  c-term may be amidated
XAKELRXQXIKTXXXXXNWVQRVVEKFLKRAEN

SEQ ID NO: 75 - protein, 33 aa, Artificial Sequence
  Description of Artificial Sequence: Synthetic peptide
  MOD_RES (2)..(2): Any L- or D-natural amino acid and any non-natural amino acid; see  specification as filed for detail ed description of substitutions, R-groups  and preferred embodiments
  MOD_RES (7)..(7): Any L- or D-natural amino acid and any non-natural amino acid; see  specification as filed for detail ed description of substitutions, R-groups  and preferred embodiments
  MOD_RES (9)..(9): Any L- or D-natural amino acid and any non-natural amino acid; see  specification as filed for detail ed description of substitutions, R-groups  and preferred embodiments
  MOD_RES (13)..(13): Any L- or D-natural amino acid and any non-natural amino acid; see  specification as filed for detail ed description of substitutions, R-groups  and preferred embodiments
  MOD_RES (14)..(17): Any L- or D-natural or non-natural amino acid, and this range may  encompass 1 or 4 residues; see spe cification as filed for detailed  description of substitutions, R-groups and preferred embodi
  c-term may be amidated
SXKELRXQXIKTXXXXXNWVQRVVEKFLKRAEN

SEQ ID NO: 76 - protein, 33 aa, Artificial Sequence
  Description of Artificial Sequence: Synthetic peptide
  MOD_RES (3)..(3): Any L- or D-natural amino acid and any non-natural amino acid; see  specification as filed for detail ed description of substitutions, R-groups  and preferred embodiments
  MOD_RES (7)..(7): Any L- or D-natural amino acid and any non-natural amino acid; see  specification as filed for detail ed description of substitutions, R-groups  and preferred embodiments
  MOD_RES (9)..(9): Any L- or D-natural amino acid and any non-natural amino acid; see  specification as filed for detail ed description of substitutions, R-groups  and preferred embodiments
  MOD_RES (13)..(13): Any L- or D-natural amino acid and any non-natural amino acid; see  specification as filed for detail ed description of substitutions, R-groups  and preferred embodiments
  MOD_RES (14)..(17): Any L- or D-natural or non-natural amino acid, and this range may  encompass 1 or 4 residues; see spe cification as filed for detailed  description of substitutions, R-groups and preferred embodi
  c-term may be amidated
SAXELRXQXIKTXXXXXNWVQRVVEKFLKRAEN

SEQ ID NO: 77 - protein, 31 aa, Artificial Sequence
  Description of Artificial Sequence: Synthetic peptide
  MOD_RES (12)..(15): Any L- or D-natural or non-natural amino acid, and this range may  encompass 1 or 4 residues; see spe cification as filed for detailed  description of substitutions, R-groups and preferred embodi
  c-term may be amidated
SAKELRCQCIKXXXXNWVQRVVEKFLKRAEN

SEQ ID NO: 78 - protein, 31 aa, Artificial Sequence
  Description of Artificial Sequence: Synthetic peptide
  MOD_RES (7)..(7): Any L- or D-natural amino acid and any non-natural amino acid; see  specification as filed for detail ed description of substitutions, R-groups  and preferred embodiments
  MOD_RES (9)..(9): Any L- or D-natural amino acid and any non-natural amino acid; see  specification as filed for detail ed description of substitutions, R-groups  and preferred embodiments
  MOD_RES (12)..(15): Any L- or D-natural or non-natural amino acid, and this range may  encompass 1 or 4 residues; see spe cification as filed for detailed  description of substitutions, R-groups and preferred embodi
  c-term may be amidated
SAKELRXQXIKXXXXNWVQRVVEKFLKRAEN

SEQ ID NO: 79 - protein, 31 aa, Artificial Sequence
  Description of Artificial Sequence: Synthetic peptide
  MOD_RES (1)..(1): Any L- or D-natural amino acid and any non-natural amino acid; see  specification as filed for detail ed description of substitutions, R-groups  and preferred embodiments
  MOD_RES (7)..(7): Any L- or D-natural amino acid and any non-natural amino acid; see  specification as filed for detail ed description of substitutions, R-groups  and preferred embodiments
  MOD_RES (9)..(9): Any L- or D-natural amino acid and any non-natural amino acid; see  specification as filed for detail ed description of substitutions, R-groups  and preferred embodiments
  MOD_RES (12)..(15): Any L- or D-natural or non-natural amino acid, and this range may  encompass 1 or 4 residues; see spe cification as filed for detailed  description of substitutions, R-groups and preferred embodi
  c-term may be amidated
XAKELRXQXIKXXXXNWVQRVVEKFLKRAEN

SEQ ID NO: 80 - protein, 31 aa, Artificial Sequence
  Description of Artificial Sequence: Synthetic peptide
  MOD_RES (2)..(2): Any L- or D-natural amino acid and any non-natural amino acid; see  specification as filed for detail ed description of substitutions, R-groups  and preferred embodiments
  MOD_RES (7)..(7): Any L- or D-natural amino acid and any non-natural amino acid; see  specification as filed for detail ed description of substitutions, R-groups  and preferred embodiments
  MOD_RES (9)..(9): Any L- or D-natural amino acid and any non-natural amino acid; see  specification as filed for detail ed description of substitutions, R-groups  and preferred embodiments
  MOD_RES (12)..(15): Any L- or D-natural or non-natural amino acid, and this range may  encompass 1 or 4 residues; see spe cification as filed for detailed  description of substitutions, R-groups and preferred embodi
  c-term may be amidated
SXKELRXQXIKXXXXNWVQRVVEKFLKRAEN

SEQ ID NO: 81 - protein, 31 aa, Artificial Sequence
  Description of Artificial Sequence: Synthetic peptide
  MOD_RES (3)..(3): Any L- or D-natural amino acid and any non-natural amino acid; see  specification as filed for detail ed description of substitutions, R-groups  and preferred embodiments
  MOD_RES (7)..(7): Any L- or D-natural amino acid and any non-natural amino acid; see  specification as filed for detail ed description of substitutions, R-groups  and preferred embodiments
  MOD_RES (9)..(9): Any L- or D-natural amino acid and any non-natural amino acid; see  specification as filed for detail ed description of substitutions, R-groups  and preferred embodiments
  MOD_RES (12)..(15): Any L- or D-natural or non-natural amino acid, and this range may  encompass 1 or 4 residues; see spe cification as filed for detailed  description of substitutions, R-groups and preferred embodi
  c-term may be amidated
SAXELRXQXIKXXXXNWVQRVVEKFLKRAEN

SEQ ID NO: 82 - protein, 31 aa, Artificial Sequence
  Description of Artificial Sequence: Synthetic peptide
  MOD_RES (7)..(7): Any L- or D-natural amino acid and any non-natural amino acid; see  specification as filed for detail ed description of substitutions, R-groups  and preferred embodiments
  MOD_RES (9)..(10): Any L- or D-natural amino acid and any non-natural amino acid; see  specification as filed for detail ed description of substitutions, R-groups  and preferred embodiments
  MOD_RES (12)..(15): Any L- or D-natural or non-natural amino acid, and this range may  encompass 1 or 4 residues; see spe cification as filed for detailed  description of substitutions, R-groups and preferred embodi
  c-term may be amidated
SAKELRXQXXKXXXXNWVQRVVEKFLKRAEN

SEQ ID NO: 83 - protein, 31 aa, Artificial Sequence
  Description of Artificial Sequence: Synthetic peptide
  MOD_RES (1)..(1): Any L- or D-natural amino acid and any non-natural amino acid; see  specification as filed for detail ed description of substitutions, R-groups  and preferred embodiments
  MOD_RES (7)..(7): Any L- or D-natural amino acid and any non-natural amino acid; see  specification as filed for detail ed description of substitutions, R-groups  and preferred embodiments
  MOD_RES (9)..(10): Any L- or D-natural amino acid and any non-natural amino acid; see  specification as filed for detail ed description of substitutions, R-groups  and preferred embodiments
  MOD_RES (12)..(15): Any L- or D-natural or non-natural amino acid, and this range may  encompass 1 or 4 residues; see spe cification as filed for detailed  description of substitutions, R-groups and preferred embodi
  c-term may be amidated
XAKELRXQXXKXXXXNWVQRVVEKFLKRAEN

SEQ ID NO: 84 - protein, 31 aa, Artificial Sequence
  Description of Artificial Sequence: Synthetic peptide
  MOD_RES (2)..(2): Any L- or D-natural amino acid and any non-natural amino acid; see  specification as filed for detail ed description of substitutions, R-groups  and preferred embodiments
  MOD_RES (7)..(7): Any L- or D-natural amino acid and any non-natural amino acid; see  specification as filed for detail ed description of substitutions, R-groups  and preferred embodiments
  MOD_RES (9)..(10): Any L- or D-natural amino acid and any non-natural amino acid; see  specification as filed for detail ed description of substitutions, R-groups  and preferred embodiments
  MOD_RES (12)..(15): Any L- or D-natural or non-natural amino acid, and this range may  encompass 1 or 4 residues; see spe cification as filed for detailed  description of substitutions, R-groups and preferred embodi
  c-term may be amidated
SXKELRXQXXKXXXXNWVQRVVEKFLKRAEN

SEQ ID NO: 85 - protein, 31 aa, Artificial Sequence
  Description of Artificial Sequence: Synthetic peptide
  MOD_RES (3)..(3): Any L- or D-natural amino acid and any non-natural amino acid; see  specification as filed for detail ed description of substitutions, R-groups  and preferred embodiments
  MOD_RES (7)..(7): Any L- or D-natural amino acid and any non-natural amino acid; see  specification as filed for detail ed description of substitutions, R-groups  and preferred embodiments
  MOD_RES (9)..(10): Any L- or D-natural amino acid and any non-natural amino acid; see  specification as filed for detail ed description of substitutions, R-groups  and preferred embodiments
  MOD_RES (12)..(15): Any L- or D-natural or non-natural amino acid, and this range may  encompass 1 or 4 residues; see spe cification as filed for detailed  description of substitutions, R-groups and preferred embodi
  c-term may be amidated
SAXELRXQXXKXXXXNWVQRVVEKFLKRAEN

SEQ ID NO: 86 - protein, 31 aa, Artificial Sequence
  Description of Artificial Sequence: Synthetic peptide
  MOD_RES (7)..(7): Any L- or D-natural amino acid and any non-natural amino acid; see  specification as filed for detail ed description of substitutions, R-groups  and preferred embodiments
  MOD_RES (9)..(9): Any L- or D-natural amino acid and any non-natural amino acid; see  specification as filed for detail ed description of substitutions, R-groups  and preferred embodiments
  MOD_RES (11)..(11): Any L- or D-natural amino acid and any non-natural amino acid; see  specification as filed for detail ed description of substitutions, R-groups  and preferred embodiments
  MOD_RES (12)..(15): Any L- or D-natural or non-natural amino acid, and this range may  encompass 1 or 4 residues; see spe cification as filed for detailed  description of substitutions, R-groups and preferred embodi
  c-term may be amidated
SAKELRXQXIXXXXXNWVQRVVEKFLKRAEN

SEQ ID NO: 87 - protein, 31 aa, Artificial Sequence
  Description of Artificial Sequence: Synthetic peptide
  MOD_RES (1)..(1): Any L- or D-natural amino acid and any non-natural amino acid; see  specification as filed for detail ed description of substitutions, R-groups  and preferred embodiments
  MOD_RES (7)..(7): Any L- or D-natural amino acid and any non-natural amino acid; see  specification as filed for detail ed description of substitutions, R-groups  and preferred embodiments
  MOD_RES (9)..(9): Any L- or D-natural amino acid and any non-natural amino acid; see  specification as filed for detail ed description of substitutions, R-groups  and preferred embodiments
  MOD_RES (11)..(11): Any L- or D-natural amino acid and any non-natural amino acid; see  specification as filed for detail ed description of substitutions, R-groups  and preferred embodiments
  MOD_RES (12)..(15): Any L- or D-natural or non-natural amino acid, and this range may  encompass 1 or 4 residues; see spe cification as filed for detailed  description of substitutions, R-groups and preferred embodi
  c-term may be amidated
XAKELRXQXIXXXXXNWVQRVVEKFLKRAEN

SEQ ID NO: 88 - protein, 31 aa, Artificial Sequence
  Description of Artificial Sequence: Synthetic peptide
  MOD_RES (2)..(2): Any L- or D-natural amino acid and any non-natural amino acid; see  specification as filed for detail ed description of substitutions, R-groups  and preferred embodiments
  MOD_RES (7)..(7): Any L- or D-natural amino acid and any non-natural amino acid; see  specification as filed for detail ed description of substitutions, R-groups  and preferred embodiments
  MOD_RES (9)..(9): Any L- or D-natural amino acid and any non-natural amino acid; see  specification as filed for detail ed description of substitutions, R-groups  and preferred embodiments
  MOD_RES (11)..(11): Any L- or D-natural amino acid and any non-natural amino acid; see  specification as filed for detail ed description of substitutions, R-groups  and preferred embodiments
  MOD_RES (12)..(15): Any L- or D-natural or non-natural amino acid, and this range may  encompass 1 or 4 residues; see spe cification as filed for detailed  description of substitutions, R-groups and preferred embodi
  c-term may be amidated
SXKELRXQXIXXXXXNWVQRVVEKFLKRAEN

SEQ ID NO: 89 - protein, 31 aa, Artificial Sequence
  Description of Artificial Sequence: Synthetic peptide
  MOD_RES (3)..(3): Any L- or D-natural amino acid and any non-natural amino acid; see  specification as filed for detail ed description of substitutions, R-groups  and preferred embodiments
  MOD_RES (7)..(7): Any L- or D-natural amino acid and any non-natural amino acid; see  specification as filed for detail ed description of substitutions, R-groups  and preferred embodiments
  MOD_RES (9)..(9): Any L- or D-natural amino acid and any non-natural amino acid; see  specification as filed for detail ed description of substitutions, R-groups  and preferred embodiments
  MOD_RES (11)..(11): Any L- or D-natural amino acid and any non-natural amino acid; see  specification as filed for detail ed description of substitutions, R-groups  and preferred embodiments
  MOD_RES (12)..(15): Any L- or D-natural or non-natural amino acid, and this range may  encompass 1 or 4 residues; see spe cification as filed for detailed  description of substitutions, R-groups and preferred embodi
  c-term may be amidated
SAXELRXQXIXXXXXNWVQRVVEKFLKRAEN

SEQ ID NO: 90 - protein, 13 aa, Artificial Sequence
  Description of Artificial Sequence: Synthetic peptide
  MOD_RES (1)..(1): Any L- or D-natural amino acid and any non-natural amino acid; see  specification as filed for detail ed description of substitutions, R-groups  and preferred embodiments
  MOD_RES (7)..(7): Any L- or D-natural amino acid and any non-natural amino acid; see  specification as filed for detail ed description of substitutions, R-groups  and preferred embodiments
  MOD_RES (9)..(9): Any L- or D-natural amino acid and any non-natural amino acid; see  specification as filed for detail ed description of substitutions, R-groups  and preferred embodiments
  MOD_RES (13)..(13): Any L- or D-natural amino acid and any non-natural amino acid; see  specification as filed for detail ed description of substitutions, R-groups  and preferred embodiments
  c-term may be amidated
XAKELRXQXIKTX

SEQ ID NO: 91 - protein, 13 aa, Artificial Sequence
  Description of Artificial Sequence: Synthetic peptide
  MOD_RES (1)..(2): Any L- or D-natural amino acid and any non-natural amino acid; see  specification as filed for detail ed description of substitutions, R-groups  and preferred embodiments
  MOD_RES (7)..(7): Any L- or D-natural amino acid and any non-natural amino acid; see  specification as filed for detail ed description of substitutions, R-groups  and preferred embodiments
  MOD_RES (9)..(9): Any L- or D-natural amino acid and any non-natural amino acid; see  specification as filed for detail ed description of substitutions, R-groups  and preferred embodiments
  MOD_RES (13)..(13): Any L- or D-natural amino acid and any non-natural amino acid; see  specification as filed for detail ed description of substitutions, R-groups  and preferred embodiments
  c-term may be amidated
XXKELRXQXIKTX

SEQ ID NO: 92 - protein, 13 aa, Artificial Sequence
  Description of Artificial Sequence: Synthetic peptide
  MOD_RES (1)..(1): Any L- or D-natural amino acid and any non-natural amino acid; see  specification as filed for detail ed description of substitutions, R-groups  and preferred embodiments
  MOD_RES (3)..(3): Any L- or D-natural amino acid and any non-natural amino acid; see  specification as filed for detail ed description of substitutions, R-groups  and preferred embodiments
  MOD_RES (7)..(7): Any L- or D-natural amino acid and any non-natural amino acid; see  specification as filed for detail ed description of substitutions, R-groups  and preferred embodiments
  MOD_RES (9)..(9): Any L- or D-natural amino acid and any non-natural amino acid; see  specification as filed for detail ed description of substitutions, R-groups  and preferred embodiments
  MOD_RES (13)..(13): Any L- or D-natural amino acid and any non-natural amino acid; see  specification as filed for detail ed description of substitutions, R-groups  and preferred embodiments
  c-term may be amidated
XAXELRXQXIKTX

SEQ ID NO: 93 - protein, 26 aa, Artificial Sequence
  Description of Artificial Sequence: Synthetic peptide
  MOD_RES (1)..(1): Any L- or D-natural amino acid and any non-natural amino acid; see  specification as filed for detail ed description of substitutions, R-groups  and preferred embodiments
  MOD_RES (26)..(26): Any L- or D-natural amino acid and any non-natural amino acid; see  specification as filed for detail ed description of substitutions, R-groups  and preferred embodiments
  c-term may be amidated
XIKTYSKPFHPKFIKELRVIESGPHX

SEQ ID NO: 94 - protein, 17 aa, Artificial Sequence
  Description of Artificial Sequence: Synthetic peptide
  MOD_RES (1)..(1): Any L- or D-natural amino acid and any non-natural amino acid; see  specification as filed for detail ed description of substitutions, R-groups  and preferred embodiments
  MOD_RES (17)..(17): Any L- or D-natural amino acid and any non-natural amino acid; see  specification as filed for detail ed description of substitutions, R-groups  and preferred embodiments
  c-term may be amidated
XANTEIIVKLSDGRELX

SEQ ID NO: 95 - protein, 23 aa, Artificial Sequence
  Description of Artificial Sequence: Synthetic peptide
  MOD_RES (1)..(1): Any L- or D-natural amino acid and any non-natural amino acid; see  specification as filed for detail ed description of substitutions, R-groups  and preferred embodiments
  MOD_RES (23)..(23): Any L- or D-natural amino acid and any non-natural amino acid; see  specification as filed for detail ed description of substitutions, R-groups  and preferred embodiments
  c-term may be amidated
XLDPKENWVQRVVEKFLKRAENX

SEQ ID NO: 96 - protein, 23 aa, Artificial Sequence
  Description of Artificial Sequence: Synthetic peptide
  c-term may be amidated
ALDPKENWVQRVVEKFLKRAENS

SEQ ID NO: 97 - protein, 23 aa, Artificial Sequence
  Description of Artificial Sequence: Synthetic peptide
  c-term may be amidated
ALDPKENWVQRVVEKFLKRAENS

SEQ ID NO: 98 - skipped

SEQ ID NO: 99 - protein, 23 aa, Artificial Sequence
  Description of Artificial Sequence: Synthetic peptide
  c-term may be amidated
ALDPKENWVQRVVEKFLKRAENS

SEQ ID NO: 100 - protein, 35 aa, Artificial Sequence; identical to SEQ ID NO: 27
  Description of Artificial Sequence: Synthetic peptide
  MOD_RES (16)..(19): Any L- or D-natural or non-natural amino acid, and this range may  encompass 1 or 4 residues; see spe cification as filed for detailed  description of substitutions, R-groups and preferred embodi
  c-term may be amidated

SEQ ID NO: 101 - protein, 35 aa, Artificial Sequence; identical to SEQ ID NO: 28
  Description of Artificial Sequence: Synthetic peptide
  MOD_RES (7)..(7): Any L- or D-natural amino acid and any non-natural amino acid; see  specification as filed for detail ed description of substitutions, R-groups  and preferred embodiments
  MOD_RES (9)..(9): Any L- or D-natural amino acid and any non-natural amino acid; see  specification as filed for detail ed description of substitutions, R-groups  and preferred embodiments
  MOD_RES (16)..(19): Any L- or D-natural or non-natural amino acid, and this range may  encompass 1 or 4 residues; see spe cification as filed for detailed  description of substitutions, R-groups and preferred embodi
  c-term may be amidated

SEQ ID NO: 102 - protein, 35 aa, Artificial Sequence; identical to SEQ ID NO: 29
  Description of Artificial Sequence: Synthetic peptide
  MOD_RES (1)..(1): Any L- or D-natural amino acid and any non-natural amino acid; see  specification as filed for detail ed description of substitutions, R-groups  and preferred embodiments
  MOD_RES (7)..(7): Any L- or D-natural amino acid and any non-natural amino acid; see  specification as filed for detail ed description of substitutions, R-groups  and preferred embodiments
  MOD_RES (9)..(9): Any L- or D-natural amino acid and any non-natural amino acid; see  specification as filed for detail ed description of substitutions, R-groups  and preferred embodiments
  MOD_RES (16)..(19): Any L- or D-natural or non-natural amino acid, and this range may  encompass 1 or 4 residues; see spe cification as filed for detailed  description of substitutions, R-groups and preferred embodi
  c-term may be amidated

SEQ ID NO: 103 - protein, 35 aa, Artificial Sequence; identical to SEQ ID NO: 30
  Description of Artificial Sequence: Synthetic peptide
  MOD_RES (2)..(2): Any L- or D-natural amino acid and any non-natural amino acid; see  specification as filed for detail ed description of substitutions, R-groups  and preferred embodiments
  MOD_RES (7)..(7): Any L- or D-natural amino acid and any non-natural amino acid; see  specification as filed for detail ed description of substitutions, R-groups  and preferred embodiments
  MOD_RES (9)..(9): Any L- or D-natural amino acid and any non-natural amino acid; see  specification as filed for detail ed description of substitutions, R-groups  and preferred embodiments
  MOD_RES (16)..(19): Any L- or D-natural or non-natural amino acid, and this range may  encompass 1 or 4 residues; see spe cification as filed for detailed  description of substitutions, R-groups and preferred embodi
  c-term may be amidated

SEQ ID NO: 104 - protein, 35 aa, Artificial Sequence; identical to SEQ ID NO: 31
  Description of Artificial Sequence: Synthetic peptide
  MOD_RES (3)..(3): Any L- or D-natural amino acid and any non-natural amino acid; see  specification as filed for detail ed description of substitutions, R-groups  and preferred embodiments
  MOD_RES (7)..(7): Any L- or D-natural amino acid and any non-natural amino acid; see  specification as filed for detail ed description of substitutions, R-groups  and preferred embodiments
  MOD_RES (9)..(9): Any L- or D-natural amino acid and any non-natural amino acid; see  specification as filed for detail ed description of substitutions, R-groups  and preferred embodiments
  MOD_RES (16)..(19): Any L- or D-natural or non-natural amino acid, and this range may  encompass 1 or 4 residues; see spe cification as filed for detailed  description of substitutions, R-groups and preferred embodi
  c-term may be amidated

SEQ ID NO: 105 - protein, 35 aa, Artificial Sequence; identical to SEQ ID NO: 32
  Description of Artificial Sequence: Synthetic peptide
  MOD_RES (7)..(7): Any L- or D-natural amino acid and any non-natural amino acid; see  specification as filed for detail ed description of substitutions, R-groups  and preferred embodiments
  MOD_RES (9)..(10): Any L- or D-natural amino acid and any non-natural amino acid; see  specification as filed for detail ed description of substitutions, R-groups  and preferred embodiments
  MOD_RES (16)..(19): Any L- or D-natural or non-natural amino acid, and this range may  encompass 1 or 4 residues; see spe cification as filed for detailed  description of substitutions, R-groups and preferred embodi
  c-term may be amidated

SEQ ID NO: 106 - protein, 35 aa, Artificial Sequence; identical to SEQ ID NO: 33
  Description of Artificial Sequence: Synthetic peptide
  MOD_RES (1)..(1): Any L- or D-natural amino acid and any non-natural amino acid; see  specification as filed for detail ed description of substitutions, R-groups  and preferred embodiments
  MOD_RES (7)..(7): Any L- or D-natural amino acid and any non-natural amino acid; see  specification as filed for detail ed description of substitutions, R-groups  and preferred embodiments
  MOD_RES (9)..(10): Any L- or D-natural amino acid and any non-natural amino acid; see  specification as filed for detail ed description of substitutions, R-groups  and preferred embodiments
  MOD_RES (16)..(19): Any L- or D-natural or non-natural amino acid, and this range may  encompass 1 or 4 residues; see spe cification as filed for detailed  description of substitutions, R-groups and preferred embodi
  c-term may be amidated

SEQ ID NO: 107 - protein, 35 aa, Artificial Sequence; identical to SEQ ID NO: 34
  Description of Artificial Sequence: Synthetic peptide
  MOD_RES (2)..(2): Any L- or D-natural amino acid and any non-natural amino acid; see  specification as filed for detail ed description of substitutions, R-groups  and preferred embodiments
  MOD_RES (7)..(7): Any L- or D-natural amino acid and any non-natural amino acid; see  specification as filed for detail ed description of substitutions, R-groups  and preferred embodiments
  MOD_RES (9)..(10): Any L- or D-natural amino acid and any non-natural amino acid; see  specification as filed for detail ed description of substitutions, R-groups  and preferred embodiments
  MOD_RES (16)..(19): Any L- or D-natural or non-natural amino acid, and this range may  encompass 1 or 4 residues; see spe cification as filed for detailed  description of substitutions, R-groups and preferred embodi
  c-term may be amidated

SEQ ID NO: 108 - protein, 35 aa, Artificial Sequence; identical to SEQ ID NO: 35
  Description of Artificial Sequence: Synthetic peptide
  MOD_RES (3)..(3): Any L- or D-natural amino acid and any non-natural amino acid; see  specification as filed for detail ed description of substitutions, R-groups  and preferred embodiments
  MOD_RES (7)..(7): Any L- or D-natural amino acid and any non-natural amino acid; see  specification as filed for detail ed description of substitutions, R-groups  and preferred embodiments
  MOD_RES (9)..(10): Any L- or D-natural amino acid and any non-natural amino acid; see  specification as filed for detail ed description of substitutions, R-groups  and preferred embodiments
  MOD_RES (16)..(19): Any L- or D-natural or non-natural amino acid, and this range may  encompass 1 or 4 residues; see spe cification as filed for detailed  description of substitutions, R-groups and preferred embodi
  c-term may be amidated

SEQ ID NO: 109 - protein, 35 aa, Artificial Sequence; identical to SEQ ID NO: 36
  Description of Artificial Sequence: Synthetic peptide
  MOD_RES (7)..(7): Any L- or D-natural amino acid and any non-natural amino acid; see  specification as filed for detail ed description of substitutions, R-groups  and preferred embodiments
  MOD_RES (9)..(9): Any L- or D-natural amino acid and any non-natural amino acid; see  specification as filed for detail ed description of substitutions, R-groups  and preferred embodiments
  MOD_RES (11)..(11): Any L- or D-natural amino acid and any non-natural amino acid; see  specification as filed for detail ed description of substitutions, R-groups  and preferred embodiments
  MOD_RES (16)..(19): Any L- or D-natural or non-natural amino acid, and this range may  encompass 1 or 4 residues; see spe cification as filed for detailed  description of substitutions, R-groups and preferred embodi
  c-term may be amidated

SEQ ID NO: 110 - protein, 35 aa, Artificial Sequence; identical to SEQ ID NO: 37
  Description of Artificial Sequence: Synthetic peptide
  MOD_RES (1)..(1): Any L- or D-natural amino acid and any non-natural amino acid; see  specification as filed for detail ed description of substitutions, R-groups  and preferred embodiments
  MOD_RES (7)..(7): Any L- or D-natural amino acid and any non-natural amino acid; see  specification as filed for detail ed description of substitutions, R-groups  and preferred embodiments
  MOD_RES (9)..(9): Any L- or D-natural amino acid and any non-natural amino acid; see  specification as filed for detail ed description of substitutions, R-groups  and preferred embodiments
  MOD_RES (11)..(11): Any L- or D-natural amino acid and any non-natural amino acid; see  specification as filed for detail ed description of substitutions, R-groups  and preferred embodiments
  MOD_RES (16)..(19): Any L- or D-natural or non-natural amino acid, and this range may  encompass 1 or 4 residues; see spe cification as filed for detailed  description of substitutions, R-groups and preferred embodi
  c-term may be amidated

SEQ ID NO: 111 - protein, 35 aa, Artificial Sequence; identical to SEQ ID NO: 38
  Description of Artificial Sequence: Synthetic peptide
  MOD_RES (2)..(2): Any L- or D-natural amino acid and any non-natural amino acid; see  specification as filed for detail ed description of substitutions, R-groups  and preferred embodiments
  MOD_RES (7)..(7): Any L- or D-natural amino acid and any non-natural amino acid; see  specification as filed for detail ed description of substitutions, R-groups  and preferred embodiments
  MOD_RES (9)..(9): Any L- or D-natural amino acid and any non-natural amino acid; see  specification as filed for detail ed description of substitutions, R-groups  and preferred embodiments
  MOD_RES (11)..(11): Any L- or D-natural amino acid and any non-natural amino acid; see  specification as filed for detail ed description of substitutions, R-groups  and preferred embodiments
  MOD_RES (16)..(19): Any L- or D-natural or non-natural amino acid, and this range may  encompass 1 or 4 residues; see spe cification as filed for detailed  description of substitutions, R-groups and preferred embodi
  c-term may be amidated

SEQ ID NO: 112 - protein, 35 aa, Artificial Sequence; identical to SEQ ID NO: 39
  Description of Artificial Sequence: Synthetic peptide
  MOD_RES (3)..(3): Any L- or D-natural amino acid and any non-natural amino acid; see  specification as filed for detail ed description of substitutions, R-groups  and preferred embodiments
  MOD_RES (7)..(7): Any L- or D-natural amino acid and any non-natural amino acid; see  specification as filed for detail ed description of substitutions, R-groups  and preferred embodiments
  MOD_RES (9)..(9): Any L- or D-natural amino acid and any non-natural amino acid; see  specification as filed for detail ed description of substitutions, R-groups  and preferred embodiments
  MOD_RES (11)..(11): Any L- or D-natural amino acid and any non-natural amino acid; see  specification as filed for detail ed description of substitutions, R-groups  and preferred embodiments
  MOD_RES (16)..(19): Any L- or D-natural or non-natural amino acid, and this range may  encompass 1 or 4 residues; see spe cification as filed for detailed  description of substitutions, R-groups and preferred embodi
  c-term may be amidated

SEQ ID NO: 113 - protein, 35 aa, Artificial Sequence; identical to SEQ ID NO: 40
  Description of Artificial Sequence: Synthetic peptide
  MOD_RES (7)..(7): Any L- or D-natural amino acid and any non-natural amino acid; see  specification as filed for detail ed description of substitutions, R-groups  and preferred embodiments
  MOD_RES (9)..(9): Any L- or D-natural amino acid and any non-natural amino acid; see  specification as filed for detail ed description of substitutions, R-groups  and preferred embodiments
  MOD_RES (12)..(12): Any L- or D-natural amino acid and any non-natural amino acid; see  specification as filed for detail ed description of substitutions, R-groups  and preferred embodiments
  MOD_RES (16)..(19): Any L- or D-natural or non-natural amino acid, and this range may  encompass 1 or 4 residues; see spe cification as filed for detailed  description of substitutions, R-groups and preferred embodi
  c-term may be amidated

SEQ ID NO: 114 - protein, 35 aa, Artificial Sequence; identical to SEQ ID NO: 41
  Description of Artificial Sequence: Synthetic peptide
  MOD_RES (1)..(1): Any L- or D-natural amino acid and any non-natural amino acid; see  specification as filed for detail ed description of substitutions, R-groups  and preferred embodiments
  MOD_RES (7)..(7): Any L- or D-natural amino acid and any non-natural amino acid; see  specification as filed for detail ed description of substitutions, R-groups  and preferred embodiments
  MOD_RES (9)..(9): Any L- or D-natural amino acid and any non-natural amino acid; see  specification as filed for detail ed description of substitutions, R-groups  and preferred embodiments
  MOD_RES (12)..(12): Any L- or D-natural amino acid and any non-natural amino acid; see  specification as filed for detail ed description of substitutions, R-groups  and preferred embodiments
  MOD_RES (16)..(19): Any L- or D-natural or non-natural amino acid, and this range may  encompass 1 or 4 residues; see spe cification as filed for detailed  description of substitutions, R-groups and preferred embodi
  c-term may be amidated

SEQ ID NO: 115 - protein, 35 aa, Artificial Sequence; identical to SEQ ID NO: 42
  Description of Artificial Sequence: Synthetic peptide
  MOD_RES (2)..(2): Any L- or D-natural amino acid and any non-natural amino acid; see  specification as filed for detail ed description of substitutions, R-groups  and preferred embodiments
  MOD_RES (7)..(7): Any L- or D-natural amino acid and any non-natural amino acid; see  specification as filed for detail ed description of substitutions, R-groups  and preferred embodiments
  MOD_RES (9)..(9): Any L- or D-natural amino acid and any non-natural amino acid; see  specification as filed for detail ed description of substitutions, R-groups  and preferred embodiments
  MOD_RES (12)..(12): Any L- or D-natural amino acid and any non-natural amino acid; see  specification as filed for detail ed description of substitutions, R-groups  and preferred embodiments
  MOD_RES (16)..(19): Any L- or D-natural or non-natural amino acid, and this range may  encompass 1 or 4 residues; see spe cification as filed for detailed  description of substitutions, R-groups and preferred embodi
  c-term may be amidated

SEQ ID NO: 116 - protein, 35 aa, Artificial Sequence; identical to SEQ ID NO: 43
  Description of Artificial Sequence: Synthetic peptide
  MOD_RES (3)..(3): Any L- or D-natural amino acid and any non-natural amino acid; see  specification as filed for detail ed description of substitutions, R-groups  and preferred embodiments
  MOD_RES (7)..(7): Any L- or D-natural amino acid and any non-natural amino acid; see  specification as filed for detail ed description of substitutions, R-groups  and preferred embodiments
  MOD_RES (9)..(9): Any L- or D-natural amino acid and any non-natural amino acid; see  specification as filed for detail ed description of substitutions, R-groups  and preferred embodiments
  MOD_RES (12)..(12): Any L- or D-natural amino acid and any non-natural amino acid; see  specification as filed for detail ed description of substitutions, R-groups  and preferred embodiments
  MOD_RES (16)..(19): Any L- or D-natural or non-natural amino acid, and this range may  encompass 1 or 4 residues; see spe cification as filed for detailed  description of substitutions, R-groups and preferred embodi
  c-term may be amidated

SEQ ID NO: 117 - protein, 35 aa, Artificial Sequence; identical to SEQ ID NO: 44
  Description of Artificial Sequence: Synthetic peptide
  MOD_RES (7)..(7): Any L- or D-natural amino acid and any non-natural amino acid; see  specification as filed for detail ed description of substitutions, R-groups  and preferred embodiments
  MOD_RES (9)..(9): Any L- or D-natural amino acid and any non-natural amino acid; see  specification as filed for detail ed description of substitutions, R-groups  and preferred embodiments
  MOD_RES (13)..(13): Any L- or D-natural amino acid and any non-natural amino acid; see  specification as filed for detail ed description of substitutions, R-groups  and preferred embodiments
  MOD_RES (16)..(19): Any L- or D-natural or non-natural amino acid, and this range may  encompass 1 or 4 residues; see spe cification as filed for detailed  description of substitutions, R-groups and preferred embodi
  c-term may be amidated

SEQ ID NO: 118 - protein, 35 aa, Artificial Sequence; identical to SEQ ID NO: 45
  Description of Artificial Sequence: Synthetic peptide
  MOD_RES (1)..(1): Any L- or D-natural amino acid and any non-natural amino acid; see  specification as filed for detail ed description of substitutions, R-groups  and preferred embodiments
  MOD_RES (7)..(7): Any L- or D-natural amino acid and any non-natural amino acid; see  specification as filed for detail ed description of substitutions, R-groups  and preferred embodiments
  MOD_RES (9)..(9): Any L- or D-natural amino acid and any non-natural amino acid; see  specification as filed for detail ed description of substitutions, R-groups  and preferred embodiments
  MOD_RES (13)..(13): Any L- or D-natural amino acid and any non-natural amino acid; see  specification as filed for detail ed description of substitutions, R-groups  and preferred embodiments
  MOD_RES (16)..(19): Any L- or D-natural or non-natural amino acid, and this range may  encompass 1 or 4 residues; see spe cification as filed for detailed  description of substitutions, R-groups and preferred embodi
  c-term may be amidated

SEQ ID NO: 119 - protein, 35 aa, Artificial Sequence; identical to SEQ ID NO: 46
  Description of Artificial Sequence: Synthetic peptide
  MOD_RES (2)..(2): Any L- or D-natural amino acid and any non-natural amino acid; see  specification as filed for detail ed description of substitutions, R-groups  and preferred embodiments
  MOD_RES (7)..(7): Any L- or D-natural amino acid and any non-natural amino acid; see  specification as filed for detail ed description of substitutions, R-groups  and preferred embodiments
  MOD_RES (9)..(9): Any L- or D-natural amino acid and any non-natural amino acid; see  specification as filed for detail ed description of substitutions, R-groups  and preferred embodiments
  MOD_RES (13)..(13): Any L- or D-natural amino acid and any non-natural amino acid; see  specification as filed for detail ed description of substitutions, R-groups  and preferred embodiments
  MOD_RES (16)..(19): Any L- or D-natural or non-natural amino acid, and this range may  encompass 1 or 4 residues; see spe cification as filed for detailed  description of substitutions, R-groups and preferred embodi
  c-term may be amidated

SEQ ID NO: 120 - protein, 35 aa, Artificial Sequence; identical to SEQ ID NO: 47
  Description of Artificial Sequence: Synthetic peptide
  MOD_RES (3)..(3): Any L- or D-natural amino acid and any non-natural amino acid; see  specification as filed for detail ed description of substitutions, R-groups  and preferred embodiments
  MOD_RES (7)..(7): Any L- or D-natural amino acid and any non-natural amino acid; see  specification as filed for detail ed description of substitutions, R-groups  and preferred embodiments
  MOD_RES (9)..(9): Any L- or D-natural amino acid and any non-natural amino acid; see  specification as filed for detail ed description of substitutions, R-groups  and preferred embodiments
  MOD_RES (13)..(13): Any L- or D-natural amino acid and any non-natural amino acid; see  specification as filed for detail ed description of substitutions, R-groups  and preferred embodiments
  MOD_RES (16)..(19): Any L- or D-natural or non-natural amino acid, and this range may  encompass 1 or 4 residues; see spe cification as filed for detailed  description of substitutions, R-groups and preferred embodi
  c-term may be amidated

SEQ ID NO: 121 - protein, 35 aa, Artificial Sequence; identical to SEQ ID NO: 48
  Description of Artificial Sequence: Synthetic peptide
  MOD_RES (7)..(7): Any L- or D-natural amino acid and any non-natural amino acid; see  specification as filed for detail ed description of substitutions, R-groups  and preferred embodiments
  MOD_RES (9)..(9): Any L- or D-natural amino acid and any non-natural amino acid; see  specification as filed for detail ed description of substitutions, R-groups  and preferred embodiments
  MOD_RES (14)..(14): Any L- or D-natural amino acid and any non-natural amino acid; see  specification as filed for detail ed description of substitutions, R-groups  and preferred embodiments
  MOD_RES (16)..(19): Any L- or D-natural or non-natural amino acid, and this range may  encompass 1 or 4 residues; see spe cification as filed for detailed  description of substitutions, R-groups and preferred embodi
  c-term may be amidated

SEQ ID NO: 122 - protein, 35 aa, Artificial Sequence; identical to SEQ ID NO: 49
  Description of Artificial Sequence: Synthetic peptide
  MOD_RES (1)..(1): Any L- or D-natural amino acid and any non-natural amino acid; see  specification as filed for detail ed description of substitutions, R-groups  and preferred embodiments
  MOD_RES (7)..(7): Any L- or D-natural amino acid and any non-natural amino acid; see  specification as filed for detail ed description of substitutions, R-groups  and preferred embodiments
  MOD_RES (9)..(9): Any L- or D-natural amino acid and any non-natural amino acid; see  specification as filed for detail ed description of substitutions, R-groups  and preferred embodiments
  MOD_RES (14)..(14): Any L- or D-natural amino acid and any non-natural amino acid; see  specification as filed for detail ed description of substitutions, R-groups  and preferred embodiments
  MOD_RES (16)..(19): Any L- or D-natural or non-natural amino acid, and this range may  encompass 1 or 4 residues; see spe cification as filed for detailed  description of substitutions, R-groups and preferred embodi
  c-term may be amidated

SEQ ID NO: 123 - protein, 35 aa, Artificial Sequence; identical to SEQ ID NO: 50
  Description of Artificial Sequence: Synthetic peptide
  MOD_RES (2)..(2): Any L- or D-natural amino acid and any non-natural amino acid; see  specification as filed for detail ed description of substitutions, R-groups  and preferred embodiments
  MOD_RES (7)..(7): Any L- or D-natural amino acid and any non-natural amino acid; see  specification as filed for detail ed description of substitutions, R-groups  and preferred embodiments
  MOD_RES (9)..(9): Any L- or D-natural amino acid and any non-natural amino acid; see  specification as filed for detail ed description of substitutions, R-groups  and preferred embodiments
  MOD_RES (14)..(14): Any L- or D-natural amino acid and any non-natural amino acid; see  specification as filed for detail ed description of substitutions, R-groups  and preferred embodiments
  MOD_RES (16)..(19): Any L- or D-natural or non-natural amino acid, and this range may  encompass 1 or 4 residues; see spe cification as filed for detailed  description of substitutions, R-groups and preferred embodi
  c-term may be amidated

SEQ ID NO: 124 - protein, 35 aa, Artificial Sequence; identical to SEQ ID NO: 51
  Description of Artificial Sequence: Synthetic peptide
  MOD_RES (3)..(3): Any L- or D-natural amino acid and any non-natural amino acid; see  specification as filed for detail ed description of substitutions, R-groups  and preferred embodiments
  MOD_RES (7)..(7): Any L- or D-natural amino acid and any non-natural amino acid; see  specification as filed for detail ed description of substitutions, R-groups  and preferred embodiments
  MOD_RES (9)..(9): Any L- or D-natural amino acid and any non-natural amino acid; see  specification as filed for detail ed description of substitutions, R-groups  and preferred embodiments
  MOD_RES (14)..(14): Any L- or D-natural amino acid and any non-natural amino acid; see  specification as filed for detail ed description of substitutions, R-groups  and preferred embodiments
  MOD_RES (16)..(19): Any L- or D-natural or non-natural amino acid, and this range may  encompass 1 or 4 residues; see spe cification as filed for detailed  description of substitutions, R-groups and preferred embodi
  c-term may be amidated

SEQ ID NO: 125 - protein, 35 aa, Artificial Sequence; identical to SEQ ID NO: 52
  Description of Artificial Sequence: Synthetic peptide
  MOD_RES (7)..(7): Any L- or D-natural amino acid and any non-natural amino acid; see  specification as filed for detail ed description of substitutions, R-groups  and preferred embodiments
  MOD_RES (9)..(9): Any L- or D-natural amino acid and any non-natural amino acid; see  specification as filed for detail ed description of substitutions, R-groups  and preferred embodiments
  MOD_RES (15)..(15): Any L- or D-natural amino acid and any non-natural amino acid; see  specification as filed for detail ed description of substitutions, R-groups  and preferred embodiments
  MOD_RES (16)..(19): Any L- or D-natural or non-natural amino acid, and this range may  encompass 1 or 4 residues; see spe cification as filed for detailed  description of substitutions, R-groups and preferred embodi
  c-term may be amidated

SEQ ID NO: 126 - protein, 35 aa, Artificial Sequence; identical to SEQ ID NO: 53
  Description of Artificial Sequence: Synthetic peptide
  MOD_RES (1)..(1): Any L- or D-natural amino acid and any non-natural amino acid; see  specification as filed for detail ed description of substitutions, R-groups  and preferred embodiments
  MOD_RES (7)..(7): Any L- or D-natural amino acid and any non-natural amino acid; see  specification as filed for detail ed description of substitutions, R-groups  and preferred embodiments
  MOD_RES (9)..(9): Any L- or D-natural amino acid and any non-natural amino acid; see  specification as filed for detail ed description of substitutions, R-groups  and preferred embodiments
  MOD_RES (15)..(15): Any L- or D-natural amino acid and any non-natural amino acid; see  specification as filed for detail ed description of substitutions, R-groups  and preferred embodiments
  MOD_RES (16)..(19): Any L- or D-natural or non-natural amino acid, and this range may  encompass 1 or 4 residues; see spe cification as filed for detailed  description of substitutions, R-groups and preferred embodi
  c-term may be amidated

SEQ ID NO: 127 - protein, 35 aa, Artificial Sequence; identical to SEQ ID NO: 54
  Description of Artificial Sequence: Synthetic peptide
  MOD_RES (2)..(2): Any L- or D-natural amino acid and any non-natural amino acid; see  specification as filed for detail ed description of substitutions, R-groups  and preferred embodiments
  MOD_RES (7)..(7): Any L- or D-natural amino acid and any non-natural amino acid; see  specification as filed for detail ed description of substitutions, R-groups  and preferred embodiments
  MOD_RES (9)..(9): Any L- or D-natural amino acid and any non-natural amino acid; see  specification as filed for detail ed description of substitutions, R-groups  and preferred embodiments
  MOD_RES (15)..(15): Any L- or D-natural amino acid and any non-natural amino acid; see  specification as filed for detail ed description of substitutions, R-groups  and preferred embodiments
  MOD_RES (16)..(19): Any L- or D-natural or non-natural amino acid, and this range may  encompass 1 or 4 residues; see spe cification as filed for detailed  description of substitutions, R-groups and preferred embodi
  c-term may be amidated

SEQ ID NO: 128 - protein, 35 aa, Artificial Sequence; identical to SEQ ID NO: 55
  Description of Artificial Sequence: Synthetic peptide
  MOD_RES (3)..(3): Any L- or D-natural amino acid and any non-natural amino acid; see  specification as filed for detail ed description of substitutions, R-groups  and preferred embodiments
  MOD_RES (7)..(7): Any L- or D-natural amino acid and any non-natural amino acid; see  specification as filed for detail ed description of substitutions, R-groups  and preferred embodiments
  MOD_RES (9)..(9): Any L- or D-natural amino acid and any non-natural amino acid; see  specification as filed for detail ed description of substitutions, R-groups  and preferred embodiments
  MOD_RES (15)..(15): Any L- or D-natural amino acid and any non-natural amino acid; see  specification as filed for detail ed description of substitutions, R-groups  and preferred embodiments
  MOD_RES (16)..(19): Any L- or D-natural or non-natural amino acid, and this range may  encompass 1 or 4 residues; see spe cification as filed for detailed  description of substitutions, R-groups and preferred embodi
  c-term may be amidated

SEQ ID NO: 129 - protein, 33 aa, Artificial Sequence; identical to SEQ ID NO: 56
  Description of Artificial Sequence: Synthetic peptide
  MOD_RES (14)..(17): Any L- or D-natural or non-natural amino acid, and this range may  encompass 1 or 4 residues; see spe cification as filed for detailed  description of substitutions, R-groups and preferred embodi
  c-term may be amidated

SEQ ID NO: 130 - protein, 33 aa, Artificial Sequence; identical to SEQ ID NO: 57
  Description of Artificial Sequence: Synthetic peptide
  MOD_RES (7)..(7): Any L- or D-natural amino acid and any non-natural amino acid; see  specification as filed for detail ed description of substitutions, R-groups  and preferred embodiments
  MOD_RES (9)..(9): Any L- or D-natural amino acid and any non-natural amino acid; see  specification as filed for detail ed description of substitutions, R-groups  and preferred embodiments
  MOD_RES (14)..(17): Any L- or D-natural or non-natural amino acid, and this range may  encompass 1 or 4 residues; see spe cification as filed for detailed  description of substitutions, R-groups and preferred embodi
  c-term may be amidated

SEQ ID NO: 131 - protein, 33 aa, Artificial Sequence; identical to SEQ ID NO: 58
  Description of Artificial Sequence: Synthetic peptide
  MOD_RES (1)..(1): Any L- or D-natural amino acid and any non-natural amino acid; see  specification as filed for detail ed description of substitutions, R-groups  and preferred embodiments
  MOD_RES (7)..(7): Any L- or D-natural amino acid and any non-natural amino acid; see  specification as filed for detail ed description of substitutions, R-groups  and preferred embodiments
  MOD_RES (9)..(9): Any L- or D-natural amino acid and any non-natural amino acid; see  specification as filed for detail ed description of substitutions, R-groups  and preferred embodiments
  MOD_RES (14)..(17): Any L- or D-natural or non-natural amino acid, and this range may  encompass 1 or 4 residues; see spe cification as filed for detailed  description of substitutions, R-groups and preferred embodi
  c-term may be amidated

SEQ ID NO: 132 - protein, 33 aa, Artificial Sequence; identical to SEQ ID NO: 59
  Description of Artificial Sequence: Synthetic peptide
  MOD_RES (2)..(2): Any L- or D-natural amino acid and any non-natural amino acid; see  specification as filed for detail ed description of substitutions, R-groups  and preferred embodiments
  MOD_RES (7)..(7): Any L- or D-natural amino acid and any non-natural amino acid; see  specification as filed for detail ed description of substitutions, R-groups  and preferred embodiments
  MOD_RES (9)..(9): Any L- or D-natural amino acid and any non-natural amino acid; see  specification as filed for detail ed description of substitutions, R-groups  and preferred embodiments
  MOD_RES (14)..(17): Any L- or D-natural or non-natural amino acid, and this range may  encompass 1 or 4 residues; see spe cification as filed for detailed  description of substitutions, R-groups and preferred embodi
  c-term may be amidated

SEQ ID NO: 133 - protein, 33 aa, Artificial Sequence; identical to SEQ ID NO: 60
  Description of Artificial Sequence: Synthetic peptide
  MOD_RES (3)..(3): Any L- or D-natural amino acid and any non-natural amino acid; see  specification as filed for detail ed description of substitutions, R-groups  and preferred embodiments
  MOD_RES (7)..(7): Any L- or D-natural amino acid and any non-natural amino acid; see  specification as filed for detail ed description of substitutions, R-groups  and preferred embodiments
  MOD_RES (9)..(9): Any L- or D-natural amino acid and any non-natural amino acid; see  specification as filed for detail ed description of substitutions, R-groups  and preferred embodiments
  MOD_RES (14)..(17): Any L- or D-natural or non-natural amino acid, and this range may  encompass 1 or 4 residues; see spe cification as filed for detailed  description of substitutions, R-groups and preferred embodi
  c-term may be amidated

SEQ ID NO: 134 - protein, 33 aa, Artificial Sequence; identical to SEQ ID NO: 61
  Description of Artificial Sequence: Synthetic peptide
  MOD_RES (7)..(7): Any L- or D-natural amino acid and any non-natural amino acid; see  specification as filed for detail ed description of substitutions, R-groups  and preferred embodiments
  MOD_RES (9)..(10): Any L- or D-natural amino acid and any non-natural amino acid; see  specification as filed for detail ed description of substitutions, R-groups  and preferred embodiments
  MOD_RES (14)..(17): Any L- or D-natural or non-natural amino acid, and this range may  encompass 1 or 4 residues; see spe cification as filed for detailed  description of substitutions, R-groups and preferred embodi
  c-term may be amidated

SEQ ID NO: 135 - protein, 33 aa, Artificial Sequence; identical to SEQ ID NO: 62
  Description of Artificial Sequence: Synthetic peptide
  MOD_RES (1)..(1): Any L- or D-natural amino acid and any non-natural amino acid; see  specification as filed for detail ed description of substitutions, R-groups  and preferred embodiments
  MOD_RES (7)..(7): Any L- or D-natural amino acid and any non-natural amino acid; see  specification as filed for detail ed description of substitutions, R-groups  and preferred embodiments
  MOD_RES (9)..(10): Any L- or D-natural amino acid and any non-natural amino acid; see  specification as filed for detail ed description of substitutions, R-groups  and preferred embodiments
  MOD_RES (14)..(17): Any L- or D-natural or non-natural amino acid, and this range may  encompass 1 or 4 residues; see spe cification as filed for detailed  description of substitutions, R-groups and preferred embodi
  c-term may be amidated

SEQ ID NO: 136 - protein, 33 aa, Artificial Sequence; identical to SEQ ID NO: 63
  Description of Artificial Sequence: Synthetic peptide
  MOD_RES (2)..(2): Any L- or D-natural amino acid and any non-natural amino acid; see  specification as filed for detail ed description of substitutions, R-groups  and preferred embodiments
  MOD_RES (7)..(7): Any L- or D-natural amino acid and any non-natural amino acid; see  specification as filed for detail ed description of substitutions, R-groups  and preferred embodiments
  MOD_RES (9)..(10): Any L- or D-natural amino acid and any non-natural amino acid; see  specification as filed for detail ed description of substitutions, R-groups  and preferred embodiments
  MOD_RES (14)..(17): Any L- or D-natural or non-natural amino acid, and this range may  encompass 1 or 4 residues; see spe cification as filed for detailed  description of substitutions, R-groups and preferred embodi
  c-term may be amidated

SEQ ID NO: 137 - protein, 33 aa, Artificial Sequence; identical to SEQ ID NO: 64
  Description of Artificial Sequence: Synthetic peptide
  MOD_RES (3)..(3): Any L- or D-natural amino acid and any non-natural amino acid; see  specification as filed for detail ed description of substitutions, R-groups  and preferred embodiments
  MOD_RES (7)..(7): Any L- or D-natural amino acid and any non-natural amino acid; see  specification as filed for detail ed description of substitutions, R-groups  and preferred embodiments
  MOD_RES (9)..(10): Any L- or D-natural amino acid and any non-natural amino acid; see  specification as filed for detail ed description of substitutions, R-groups  and preferred embodiments
  MOD_RES (14)..(17): Any L- or D-natural or non-natural amino acid, and this range may  encompass 1 or 4 residues; see spe cification as filed for detailed  description of substitutions, R-groups and preferred embodi
  c-term may be amidated

SEQ ID NO: 138 - protein, 33 aa, Artificial Sequence; identical to SEQ ID NO: 65
  Description of Artificial Sequence: Synthetic peptide
  MOD_RES (7)..(7): Any L- or D-natural amino acid and any non-natural amino acid; see  specification as filed for detail ed description of substitutions, R-groups  and preferred embodiments
  MOD_RES (9)..(9): Any L- or D-natural amino acid and any non-natural amino acid; see  specification as filed for detail ed description of substitutions, R-groups  and preferred embodiments
  MOD_RES (11)..(11): Any L- or D-natural amino acid and any non-natural amino acid; see  specification as filed for detail ed description of substitutions, R-groups  and preferred embodiments
  MOD_RES (14)..(17): Any L- or D-natural or non-natural amino acid, and this range may  encompass 1 or 4 residues; see spe cification as filed for detailed  description of substitutions, R-groups and preferred embodi
  c-term may be amidated

SEQ ID NO: 139 - protein, 33 aa, Artificial Sequence; identical to SEQ ID NO: 66
  Description of Artificial Sequence: Synthetic peptide
  MOD_RES (1)..(1): Any L- or D-natural amino acid and any non-natural amino acid; see  specification as filed for detail ed description of substitutions, R-groups  and preferred embodiments
  MOD_RES (7)..(7): Any L- or D-natural amino acid and any non-natural amino acid; see  specification as filed for detail ed description of substitutions, R-groups  and preferred embodiments
  MOD_RES (9)..(9): Any L- or D-natural amino acid and any non-natural amino acid; see  specification as filed for detail ed description of substitutions, R-groups  and preferred embodiments
  MOD_RES (11)..(11): Any L- or D-natural amino acid and any non-natural amino acid; see  specification as filed for detail ed description of substitutions, R-groups  and preferred embodiments
  MOD_RES (14)..(17): Any L- or D-natural or non-natural amino acid, and this range may  encompass 1 or 4 residues; see spe cification as filed for detailed  description of substitutions, R-groups and preferred embodi
  c-term may be amidated

SEQ ID NO: 140 - protein, 33 aa, Artificial Sequence; identical to SEQ ID NO: 67
  Description of Artificial Sequence: Synthetic peptide
  MOD_RES (2)..(2): Any L- or D-natural amino acid and any non-natural amino acid; see  specification as filed for detail ed description of substitutions, R-groups  and preferred embodiments
  MOD_RES (7)..(7): Any L- or D-natural amino acid and any non-natural amino acid; see  specification as filed for detail ed description of substitutions, R-groups  and preferred embodiments
  MOD_RES (9)..(9): Any L- or D-natural amino acid and any non-natural amino acid; see  specification as filed for detail ed description of substitutions, R-groups  and preferred embodiments
  MOD_RES (11)..(11): Any L- or D-natural amino acid and any non-natural amino acid; see  specification as filed for detail ed description of substitutions, R-groups  and preferred embodiments
  MOD_RES (14)..(17): Any L- or D-natural or non-natural amino acid, and this range may  encompass 1 or 4 residues; see spe cification as filed for detailed  description of substitutions, R-groups and preferred embodi
  c-term may be amidated

SEQ ID NO: 141 - protein, 33 aa, Artificial Sequence; identical to SEQ ID NO: 68
  Description of Artificial Sequence: Synthetic peptide
  MOD_RES (3)..(3): Any L- or D-natural amino acid and any non-natural amino acid; see  specification as filed for detail ed description of substitutions, R-groups  and preferred embodiments
  MOD_RES (7)..(7): Any L- or D-natural amino acid and any non-natural amino acid; see  specification as filed for detail ed description of substitutions, R-groups  and preferred embodiments
  MOD_RES (9)..(9): Any L- or D-natural amino acid and any non-natural amino acid; see  specification as filed for detail ed description of substitutions, R-groups  and preferred embodiments
  MOD_RES (11)..(11): Any L- or D-natural amino acid and any non-natural amino acid; see  specification as filed for detail ed description of substitutions, R-groups  and preferred embodiments
  MOD_RES (14)..(17): Any L- or D-natural or non-natural amino acid, and this range may  encompass 1 or 4 residues; see spe cification as filed for detailed  description of substitutions, R-groups and preferred embodi
  c-term may be amidated

SEQ ID NO: 142 - protein, 33 aa, Artificial Sequence; identical to SEQ ID NO: 69
  Description of Artificial Sequence: Synthetic peptide
  MOD_RES (7)..(7): Any L- or D-natural amino acid and any non-natural amino acid; see  specification as filed for detail ed description of substitutions, R-groups  and preferred embodiments
  MOD_RES (9)..(9): Any L- or D-natural amino acid and any non-natural amino acid; see  specification as filed for detail ed description of substitutions, R-groups  and preferred embodiments
  MOD_RES (12)..(12): Any L- or D-natural amino acid and any non-natural amino acid; see  specification as filed for detail ed description of substitutions, R-groups  and preferred embodiments
  MOD_RES (14)..(17): Any L- or D-natural or non-natural amino acid, and this range may  encompass 1 or 4 residues; see spe cification as filed for detailed  description of substitutions, R-groups and preferred embodi
  c-term may be amidated

SEQ ID NO: 143 - protein, 33 aa, Artificial Sequence; identical to SEQ ID NO: 70
  Description of Artificial Sequence: Synthetic peptide
  MOD_RES (1)..(1): Any L- or D-natural amino acid and any non-natural amino acid; see  specification as filed for detail ed description of substitutions, R-groups  and preferred embodiments
  MOD_RES (7)..(7): Any L- or D-natural amino acid and any non-natural amino acid; see  specification as filed for detail ed description of substitutions, R-groups  and preferred embodiments
  MOD_RES (9)..(9): Any L- or D-natural amino acid and any non-natural amino acid; see  specification as filed for detail ed description of substitutions, R-groups  and preferred embodiments
  MOD_RES (12)..(12): Any L- or D-natural amino acid and any non-natural amino acid; see  specification as filed for detail ed description of substitutions, R-groups  and preferred embodiments
  MOD_RES (14)..(17): Any L- or D-natural or non-natural amino acid, and this range may  encompass 1 or 4 residues; see spe cification as filed for detailed  description of substitutions, R-groups and preferred embodi
  c-term may be amidated

SEQ ID NO: 144 - protein, 33 aa, Artificial Sequence; identical to SEQ ID NO: 71
  Description of Artificial Sequence: Synthetic peptide
  MOD_RES (2)..(2): Any L- or D-natural amino acid and any non-natural amino acid; see  specification as filed for detail ed description of substitutions, R-groups  and preferred embodiments
  MOD_RES (7)..(7): Any L- or D-natural amino acid and any non-natural amino acid; see  specification as filed for detail ed description of substitutions, R-groups  and preferred embodiments
  MOD_RES (9)..(9): Any L- or D-natural amino acid and any non-natural amino acid; see  specification as filed for detail ed description of substitutions, R-groups  and preferred embodiments
  MOD_RES (12)..(12): Any L- or D-natural amino acid and any non-natural amino acid; see  specification as filed for detail ed description of substitutions, R-groups  and preferred embodiments
  MOD_RES (14)..(17): Any L- or D-natural or non-natural amino acid, and this range may  encompass 1 or 4 residues; see spe cification as filed for detailed  description of substitutions, R-groups and preferred embodi
  c-term may be amidated

SEQ ID NO: 145 - protein, 33 aa, Artificial Sequence; identical to SEQ ID NO: 72
  Description of Artificial Sequence: Synthetic peptide
  MOD_RES (3)..(3): Any L- or D-natural amino acid and any non-natural amino acid; see  specification as filed for detail ed description of substitutions, R-groups  and preferred embodiments
  MOD_RES (7)..(7): Any L- or D-natural amino acid and any non-natural amino acid; see  specification as filed for detail ed description of substitutions, R-groups  and preferred embodiments
  MOD_RES (9)..(9): Any L- or D-natural amino acid and any non-natural amino acid; see  specification as filed for detail ed description of substitutions, R-groups  and preferred embodiments
  MOD_RES (12)..(12): Any L- or D-natural amino acid and any non-natural amino acid; see  specification as filed for detail ed description of substitutions, R-groups  and preferred embodiments
  MOD_RES (14)..(17): Any L- or D-natural or non-natural amino acid, and this range may  encompass 1 or 4 residues; see spe cification as filed for detailed  description of substitutions, R-groups and preferred embodi
  c-term may be amidated

SEQ ID NO: 146 - protein, 33 aa, Artificial Sequence; identical to SEQ ID NO: 73
  Description of Artificial Sequence: Synthetic peptide
  MOD_RES (7)..(7): Any L- or D-natural amino acid and any non-natural amino acid; see  specification as filed for detail ed description of substitutions, R-groups  and preferred embodiments
  MOD_RES (9)..(9): Any L- or D-natural amino acid and any non-natural amino acid; see  specification as filed for detail ed description of substitutions, R-groups  and preferred embodiments
  MOD_RES (13)..(13): Any L- or D-natural amino acid and any non-natural amino acid; see  specification as filed for detail ed description of substitutions, R-groups  and preferred embodiments
  MOD_RES (14)..(17): Any L- or D-natural or non-natural amino acid, and this range may  encompass 1 or 4 residues; see spe cification as filed for detailed  description of substitutions, R-groups and preferred embodi
  c-term may be amidated

SEQ ID NO: 147 - protein, 33 aa, Artificial Sequence; identical to SEQ ID NO: 74
  Description of Artificial Sequence: Synthetic peptide
  MOD_RES (1)..(1): Any L- or D-natural amino acid and any non-natural amino acid; see  specification as filed for detail ed description of substitutions, R-groups  and preferred embodiments
  MOD_RES (7)..(7): Any L- or D-natural amino acid and any non-natural amino acid; see  specification as filed for detail ed description of substitutions, R-groups  and preferred embodiments
  MOD_RES (9)..(9): Any L- or D-natural amino acid and any non-natural amino acid; see  specification as filed for detail ed description of substitutions, R-groups  and preferred embodiments
  MOD_RES (13)..(13): Any L- or D-natural amino acid and any non-natural amino acid; see  specification as filed for detail ed description of substitutions, R-groups  and preferred embodiments
  MOD_RES (14)..(17): Any L- or D-natural or non-natural amino acid, and this range may  encompass 1 or 4 residues; see spe cification as filed for detailed  description of substitutions, R-groups and preferred embodi
  c-term may be amidated

SEQ ID NO: 148 - protein, 33 aa, Artificial Sequence; identical to SEQ ID NO: 75
  Description of Artificial Sequence: Synthetic peptide
  MOD_RES (2)..(2): Any L- or D-natural amino acid and any non-natural amino acid; see  specification as filed for detail ed description of substitutions, R-groups  and preferred embodiments
  MOD_RES (7)..(7): Any L- or D-natural amino acid and any non-natural amino acid; see  specification as filed for detail ed description of substitutions, R-groups  and preferred embodiments
  MOD_RES (9)..(9): Any L- or D-natural amino acid and any non-natural amino acid; see  specification as filed for detail ed description of substitutions, R-groups  and preferred embodiments
  MOD_RES (13)..(13): Any L- or D-natural amino acid and any non-natural amino acid; see  specification as filed for detail ed description of substitutions, R-groups  and preferred embodiments
  MOD_RES (14)..(17): Any L- or D-natural or non-natural amino acid, and this range may  encompass 1 or 4 residues; see spe cification as filed for detailed  description of substitutions, R-groups and preferred embodi
  c-term may be amidated

SEQ ID NO: 149 - protein, 33 aa, Artificial Sequence; identical to SEQ ID NO: 76
  Description of Artificial Sequence: Synthetic peptide
  MOD_RES (3)..(3): Any L- or D-natural amino acid and any non-natural amino acid; see  specification as filed for detail ed description of substitutions, R-groups  and preferred embodiments
  MOD_RES (7)..(7): Any L- or D-natural amino acid and any non-natural amino acid; see  specification as filed for detail ed description of substitutions, R-groups  and preferred embodiments
  MOD_RES (9)..(9): Any L- or D-natural amino acid and any non-natural amino acid; see  specification as filed for detail ed description of substitutions, R-groups  and preferred embodiments
  MOD_RES (13)..(13): Any L- or D-natural amino acid and any non-natural amino acid; see  specification as filed for detail ed description of substitutions, R-groups  and preferred embodiments
  MOD_RES (14)..(17): Any L- or D-natural or non-natural amino acid, and this range may  encompass 1 or 4 residues; see spe cification as filed for detailed  description of substitutions, R-groups and preferred embodi
  c-term may be amidated

SEQ ID NO: 150 - protein, 31 aa, Artificial Sequence; identical to SEQ ID NO: 77
  Description of Artificial Sequence: Synthetic peptide
  MOD_RES (12)..(15): Any L- or D-natural or non-natural amino acid, and this range may  encompass 1 or 4 residues; see spe cification as filed for detailed  description of substitutions, R-groups and preferred embodi
  c-term may be amidated

SEQ ID NO: 151 - protein, 31 aa, Artificial Sequence; identical to SEQ ID NO: 78
  Description of Artificial Sequence: Synthetic peptide
  MOD_RES (7)..(7): Any L- or D-natural amino acid and any non-natural amino acid; see  specification as filed for detail ed description of substitutions, R-groups  and preferred embodiments
  MOD_RES (9)..(9): Any L- or D-natural amino acid and any non-natural amino acid; see  specification as filed for detail ed description of substitutions, R-groups  and preferred embodiments
  MOD_RES (12)..(15): Any L- or D-natural or non-natural amino acid, and this range may  encompass 1 or 4 residues; see spe cification as filed for detailed  description of substitutions, R-groups and preferred embodi
  c-term may be amidated

SEQ ID NO: 152 - protein, 31 aa, Artificial Sequence; identical to SEQ ID NO: 79
  Description of Artificial Sequence: Synthetic peptide
  MOD_RES (1)..(1): Any L- or D-natural amino acid and any non-natural amino acid; see  specification as filed for detail ed description of substitutions, R-groups  and preferred embodiments
  MOD_RES (7)..(7): Any L- or D-natural amino acid and any non-natural amino acid; see  specification as filed for detail ed description of substitutions, R-groups  and preferred embodiments
  MOD_RES (9)..(9): Any L- or D-natural amino acid and any non-natural amino acid; see  specification as filed for detail ed description of substitutions, R-groups  and preferred embodiments
  MOD_RES (12)..(15): Any L- or D-natural or non-natural amino acid, and this range may  encompass 1 or 4 residues; see spe cification as filed for detailed  description of substitutions, R-groups and preferred embodi
  c-term may be amidated

SEQ ID NO: 153 - protein, 31 aa, Artificial Sequence; identical to SEQ ID NO: 80
  Description of Artificial Sequence: Synthetic peptide
  MOD_RES (2)..(2): Any L- or D-natural amino acid and any non-natural amino acid; see  specification as filed for detail ed description of substitutions, R-groups  and preferred embodiments
  MOD_RES (7)..(7): Any L- or D-natural amino acid and any non-natural amino acid; see  specification as filed for detail ed description of substitutions, R-groups  and preferred embodiments
  MOD_RES (9)..(9): Any L- or D-natural amino acid and any non-natural amino acid; see  specification as filed for detail ed description of substitutions, R-groups  and preferred embodiments
  MOD_RES (12)..(15): Any L- or D-natural or non-natural amino acid, and this range may  encompass 1 or 4 residues; see spe cification as filed for detailed  description of substitutions, R-groups and preferred embodi
  c-term may be amidated

SEQ ID NO: 154 - protein, 31 aa, Artificial Sequence; identical to SEQ ID NO: 81
  Description of Artificial Sequence: Synthetic peptide
  MOD_RES (3)..(3): Any L- or D-natural amino acid and any non-natural amino acid; see  specification as filed for detail ed description of substitutions, R-groups  and preferred embodiments
  MOD_RES (7)..(7): Any L- or D-natural amino acid and any non-natural amino acid; see  specification as filed for detail ed description of substitutions, R-groups  and preferred embodiments
  MOD_RES (9)..(9): Any L- or D-natural amino acid and any non-natural amino acid; see  specification as filed for detail ed description of substitutions, R-groups  and preferred embodiments
  MOD_RES (12)..(15): Any L- or D-natural or non-natural amino acid, and this range may  encompass 1 or 4 residues; see spe cification as filed for detailed  description of substitutions, R-groups and preferred embodi
  c-term may be amidated

SEQ ID NO: 155 - protein, 31 aa, Artificial Sequence; identical to SEQ ID NO: 82
  Description of Artificial Sequence: Synthetic peptide
  MOD_RES (7)..(7): Any L- or D-natural amino acid and any non-natural amino acid; see  specification as filed for detail ed description of substitutions, R-groups  and preferred embodiments
  MOD_RES (9)..(10): Any L- or D-natural amino acid and any non-natural amino acid; see  specification as filed for detail ed description of substitutions, R-groups  and preferred embodiments
  MOD_RES (12)..(15): Any L- or D-natural or non-natural amino acid, and this range may  encompass 1 or 4 residues; see spe cification as filed for detailed  description of substitutions, R-groups and preferred embodi
  c-term may be amidated

SEQ ID NO: 156 - protein, 31 aa, Artificial Sequence; identical to SEQ ID NO: 83
  Description of Artificial Sequence: Synthetic peptide
  MOD_RES (1)..(1): Any L- or D-natural amino acid and any non-natural amino acid; see  specification as filed for detail ed description of substitutions, R-groups  and preferred embodiments
  MOD_RES (7)..(7): Any L- or D-natural amino acid and any non-natural amino acid; see  specification as filed for detail ed description of substitutions, R-groups  and preferred embodiments
  MOD_RES (9)..(10): Any L- or D-natural amino acid and any non-natural amino acid; see  specification as filed for detail ed description of substitutions, R-groups  and preferred embodiments
  MOD_RES (12)..(15): Any L- or D-natural or non-natural amino acid, and this range may  encompass 1 or 4 residues; see spe cification as filed for detailed  description of substitutions, R-groups and preferred embodi
  c-term may be amidated

SEQ ID NO: 157 - protein, 31 aa, Artificial Sequence; identical to SEQ ID NO: 84
  Description of Artificial Sequence: Synthetic peptide
  MOD_RES (2)..(2): Any L- or D-natural amino acid and any non-natural amino acid; see  specification as filed for detail ed description of substitutions, R-groups  and preferred embodiments
  MOD_RES (7)..(7): Any L- or D-natural amino acid and any non-natural amino acid; see  specification as filed for detail ed description of substitutions, R-groups  and preferred embodiments
  MOD_RES (9)..(10): Any L- or D-natural amino acid and any non-natural amino acid; see  specification as filed for detail ed description of substitutions, R-groups  and preferred embodiments
  MOD_RES (12)..(15): Any L- or D-natural or non-natural amino acid, and this range may  encompass 1 or 4 residues; see spe cification as filed for detailed  description of substitutions, R-groups and preferred embodi
  c-term may be amidated

SEQ ID NO: 158 - protein, 31 aa, Artificial Sequence; identical to SEQ ID NO: 85
  Description of Artificial Sequence: Synthetic peptide
  MOD_RES (3)..(3): Any L- or D-natural amino acid and any non-natural amino acid; see  specification as filed for detail ed description of substitutions, R-groups  and preferred embodiments
  MOD_RES (7)..(7): Any L- or D-natural amino acid and any non-natural amino acid; see  specification as filed for detail ed description of substitutions, R-groups  and preferred embodiments
  MOD_RES (9)..(10): Any L- or D-natural amino acid and any non-natural amino acid; see  specification as filed for detail ed description of substitutions, R-groups  and preferred embodiments
  MOD_RES (12)..(15): Any L- or D-natural or non-natural amino acid, and this range may  encompass 1 or 4 residues; see spe cification as filed for detailed  description of substitutions, R-groups and preferred embodi
  c-term may be amidated

SEQ ID NO: 159 - protein, 31 aa, Artificial Sequence; identical to SEQ ID NO: 86
  Description of Artificial Sequence: Synthetic peptide
  MOD_RES (7)..(7): Any L- or D-natural amino acid and any non-natural amino acid; see  specification as filed for detail ed description of substitutions, R-groups  and preferred embodiments
  MOD_RES (9)..(9): Any L- or D-natural amino acid and any non-natural amino acid; see  specification as filed for detail ed description of substitutions, R-groups  and preferred embodiments
  MOD_RES (11)..(11): Any L- or D-natural amino acid and any non-natural amino acid; see  specification as filed for detail ed description of substitutions, R-groups  and preferred embodiments
  MOD_RES (12)..(15): Any L- or D-natural or non-natural amino acid, and this range may  encompass 1 or 4 residues; see spe cification as filed for detailed  description of substitutions, R-groups and preferred embodi
  c-term may be amidated

SEQ ID NO: 160 - protein, 31 aa, Artificial Sequence; identical to SEQ ID NO: 87
  Description of Artificial Sequence: Synthetic peptide
  MOD_RES (1)..(1): Any L- or D-natural amino acid and any non-natural amino acid; see  specification as filed for detail ed description of substitutions, R-groups  and preferred embodiments
  MOD_RES (7)..(7): Any L- or D-natural amino acid and any non-natural amino acid; see  specification as filed for detail ed description of substitutions, R-groups  and preferred embodiments
  MOD_RES (9)..(9): Any L- or D-natural amino acid and any non-natural amino acid; see  specification as filed for detail ed description of substitutions, R-groups  and preferred embodiments
  MOD_RES (11)..(11): Any L- or D-natural amino acid and any non-natural amino acid; see  specification as filed for detail ed description of substitutions, R-groups  and preferred embodiments
  MOD_RES (12)..(15): Any L- or D-natural or non-natural amino acid, and this range may  encompass 1 or 4 residues; see spe cification as filed for detailed  description of substitutions, R-groups and preferred embodi
  c-term may be amidated

SEQ ID NO: 161 - protein, 31 aa, Artificial Sequence; identical to SEQ ID NO: 88
  Description of Artificial Sequence: Synthetic peptide
  MOD_RES (2)..(2): Any L- or D-natural amino acid and any non-natural amino acid; see  specification as filed for detail ed description of substitutions, R-groups  and preferred embodiments
  MOD_RES (7)..(7): Any L- or D-natural amino acid and any non-natural amino acid; see  specification as filed for detail ed description of substitutions, R-groups  and preferred embodiments
  MOD_RES (9)..(9): Any L- or D-natural amino acid and any non-natural amino acid; see  specification as filed for detail ed description of substitutions, R-groups  and preferred embodiments
  MOD_RES (11)..(11): Any L- or D-natural amino acid and any non-natural amino acid; see  specification as filed for detail ed description of substitutions, R-groups  and preferred embodiments
  MOD_RES (12)..(15): Any L- or D-natural or non-natural amino acid, and this range may  encompass 1 or 4 residues; see spe cification as filed for detailed  description of substitutions, R-groups and preferred embodi
  c-term may be amidated

SEQ ID NO: 162 - protein, 31 aa, Artificial Sequence; identical to SEQ ID NO: 89
  Description of Artificial Sequence: Synthetic peptide
  MOD_RES (3)..(3): Any L- or D-natural amino acid and any non-natural amino acid; see  specification as filed for detail ed description of substitutions, R-groups  and preferred embodiments
  MOD_RES (7)..(7): Any L- or D-natural amino acid and any non-natural amino acid; see  specification as filed for detail ed description of substitutions, R-groups  and preferred embodiments
  MOD_RES (9)..(9): Any L- or D-natural amino acid and any non-natural amino acid; see  specification as filed for detail ed description of substitutions, R-groups  and preferred embodiments
  MOD_RES (11)..(11): Any L- or D-natural amino acid and any non-natural amino acid; see  specification as filed for detail ed description of substitutions, R-groups  and preferred embodiments
  MOD_RES (12)..(15): Any L- or D-natural or non-natural amino acid, and this range may  encompass 1 or 4 residues; see spe cification as filed for detailed  description of substitutions, R-groups and preferred embodi
  c-term may be amidated

SEQ ID NO: 163 - protein, 14 aa, Artificial Sequence
  Description of Artificial Sequence: Synthetic peptide
  c-term may be amidated
VPLSRTVRCTCISI

SEQ ID NO: 164 - protein, 14 aa, Artificial Sequence
  Description of Artificial Sequence: Synthetic peptide
  MOD_RES (3)..(3): Any L- or D-natural amino acid and any non-natural amino acid; see  specification as filed for detail ed description of substitutions, R-groups  and preferred embodiments
  MOD_RES (9)..(9): Any L- or D-natural amino acid and any non-natural amino acid; see  specification as filed for detail ed description of substitutions, R-groups  and preferred embodiments
  MOD_RES (11)..(11): Any L- or D-natural amino acid and any non-natural amino acid; see  specification as filed for detail ed description of substitutions, R-groups  and preferred embodiments
  c-term may be amidated
VPXSRTVRXTXISI

SEQ ID NO: 165 - protein, 14 aa, Artificial Sequence
  Description of Artificial Sequence: Synthetic peptide
  MOD_RES (4)..(4): Any L- or D-natural amino acid and any non-natural amino acid; see  specification as filed for detail ed description of substitutions, R-groups  and preferred embodiments
  MOD_RES (9)..(9): Any L- or D-natural amino acid and any non-natural amino acid; see  specification as filed for detail ed description of substitutions, R-groups  and preferred embodiments
  MOD_RES (11)..(11): Any L- or D-natural amino acid and any non-natural amino acid; see  specification as filed for detail ed description of substitutions, R-groups  and preferred embodiments
  c-term may be amidated
VPLXRTVRXTXISI

SEQ ID NO: 166 - protein, 14 aa, Artificial Sequence
  Description of Artificial Sequence: Synthetic peptide
  MOD_RES (5)..(5): Any L- or D-natural amino acid and any non-natural amino acid; see  specification as filed for detail ed description of substitutions, R-groups  and preferred embodiments
  MOD_RES (9)..(9): Any L- or D-natural amino acid and any non-natural amino acid; see  specification as filed for detail ed description of substitutions, R-groups  and preferred embodiments
  MOD_RES (11)..(11): Any L- or D-natural amino acid and any non-natural amino acid; see  specification as filed for detail ed description of substitutions, R-groups  and preferred embodiments
  c-term may be amidated
VPLSXTVRXTXISI

SEQ ID NO: 167 - protein, 14 aa, Artificial Sequence
  Description of Artificial Sequence: Synthetic peptide
  MOD_RES (6)..(6): Any L- or D-natural amino acid and any non-natural amino acid; see  specification as filed for detail ed description of substitutions, R-groups  and preferred embodiments
  MOD_RES (9)..(9): Any L- or D-natural amino acid and any non-natural amino acid; see  specification as filed for detail ed description of substitutions, R-groups  and preferred embodiments
  MOD_RES (11)..(11): Any L- or D-natural amino acid and any non-natural amino acid; see  specification as filed for detail ed description of substitutions, R-groups  and preferred embodiments
  c-term may be amidated
VPLSRXVRXTXISI

SEQ ID NO: 168 - protein, 14 aa, Artificial Sequence
  Description of Artificial Sequence: Synthetic peptide
  MOD_RES (7)..(7): Any L- or D-natural amino acid and any non-natural amino acid; see  specification as filed for detail ed description of substitutions, R-groups  and preferred embodiments
  MOD_RES (9)..(9): Any L- or D-natural amino acid and any non-natural amino acid; see  specification as filed for detail ed description of substitutions, R-groups  and preferred embodiments
  MOD_RES (11)..(11): Any L- or D-natural amino acid and any non-natural amino acid; see  specification as filed for detail ed description of substitutions, R-groups  and preferred embodiments
  c-term may be amidated
VPLSRTXRXTXISI

SEQ ID NO: 169 - protein, 15 aa, Artificial Sequence
  Description of Artificial Sequence: Synthetic peptide
  MOD_RES (9)..(10): Any L- or D-natural amino acid and any non-natural amino acid; see  specification as filed for detail ed description of substitutions, R-groups  and preferred embodiments
  MOD_RES (12)..(12): Any L- or D-natural amino acid and any non-natural amino acid; see  specification as filed for detail ed description of substitutions, R-groups  and preferred embodiments
  c-term may be amidated
VPLSRTVRXXTXISI

SEQ ID NO: 170 - protein, 17 aa, Artificial Sequence
  Description of Artificial Sequence: Synthetic peptide
  c-term may be amidated
VPLSRTVRCTCISISNQ

SEQ ID NO: 171 - protein, 17 aa, Artificial Sequence
  Description of Artificial Sequence: Synthetic peptide
  MOD_RES (3)..(3): Any L- or D-natural amino acid and any non-natural amino acid; see  specification as filed for detail ed description of substitutions, R-groups  and preferred embodiments
  MOD_RES (9)..(9): Any L- or D-natural amino acid and any non-natural amino acid; see  specification as filed for detail ed description of substitutions, R-groups  and preferred embodiments
  MOD_RES (11)..(11): Any L- or D-natural amino acid and any non-natural amino acid; see  specification as filed for detail ed description of substitutions, R-groups  and preferred embodiments
  c-term may be amidated
VPXSRTVRXTXISISNQ

SEQ ID NO: 172 - protein, 17 aa, Artificial Sequence
  Description of Artificial Sequence: Synthetic peptide
  MOD_RES (4)..(4): Any L- or D-natural amino acid and any non-natural amino acid; see  specification as filed for detail ed description of substitutions, R-groups  and preferred embodiments
  MOD_RES (9)..(9): Any L- or D-natural amino acid and any non-natural amino acid; see  specification as filed for detail ed description of substitutions, R-groups  and preferred embodiments
  MOD_RES (11)..(11): Any L- or D-natural amino acid and any non-natural amino acid; see  specification as filed for detail ed description of substitutions, R-groups  and preferred embodiments
  c-term may be amidated
VPLXRTVRXTXISISNQ

SEQ ID NO: 173 - protein, 17 aa, Artificial Sequence
  Description of Artificial Sequence: Synthetic peptide
  MOD_RES (5)..(5): Any L- or D-natural amino acid and any non-natural amino acid; see  specification as filed for detail ed description of substitutions, R-groups  and preferred embodiments
  MOD_RES (9)..(9): Any L- or D-natural amino acid and any non-natural amino acid; see  specification as filed for detail ed description of substitutions, R-groups  and preferred embodiments
  MOD_RES (11)..(11): Any L- or D-natural amino acid and any non-natural amino acid; see  specification as filed for detail ed description of substitutions, R-groups  and preferred embodiments
  c-term may be amidated
VPLSXTVRXTXISISNQ

SEQ ID NO: 174 - protein, 17 aa, Artificial Sequence
  Description of Artificial Sequence: Synthetic peptide
  MOD_RES (6)..(6): Any L- or D-natural amino acid and any non-natural amino acid; see  specification as filed for detail ed description of substitutions, R-groups  and preferred embodiments
  MOD_RES (9)..(9): Any L- or D-natural amino acid and any non-natural amino acid; see  specification as filed for detail ed description of substitutions, R-groups  and preferred embodiments
  MOD_RES (11)..(11): Any L- or D-natural amino acid and any non-natural amino acid; see  specification as filed for detail ed description of substitutions, R-groups  and preferred embodiments
  c-term may be amidated
VPLSRXVRXTXISISNQ

SEQ ID NO: 175 - protein, 17 aa, Artificial Sequence
  Description of Artificial Sequence: Synthetic peptide
  MOD_RES (7)..(7): Any L- or D-natural amino acid and any non-natural amino acid; see  specification as filed for detail ed description of substitutions, R-groups  and preferred embodiments
  MOD_RES (9)..(9): Any L- or D-natural amino acid and any non-natural amino acid; see  specification as filed for detail ed description of substitutions, R-groups  and preferred embodiments
  MOD_RES (11)..(11): Any L- or D-natural amino acid and any non-natural amino acid; see  specification as filed for detail ed description of substitutions, R-groups  and preferred embodiments
  c-term may be amidated
VPLSRTXRXTXISISNQ

SEQ ID NO: 176 - protein, 18 aa, Artificial Sequence
  Description of Artificial Sequence: Synthetic peptide
  MOD_RES (9)..(10): Any L- or D-natural amino acid and any non-natural amino acid; see  specification as filed for detail ed description of substitutions, R-groups  and preferred embodiments
  MOD_RES (12)..(12): Any L- or D-natural amino acid and any non-natural amino acid; see  specification as filed for detail ed description of substitutions, R-groups  and preferred embodiments
  c-term may be amidated
VPLSRTVRXXTXISISNQ

SEQ ID NO: 177 - protein, 25 aa, Artificial Sequence
  Description of Artificial Sequence: Synthetic peptide
  c-term may be amidated
AISISNQPVNPRSLEKLEIIPASQF

SEQ ID NO: 178 - protein, 35 aa, Artificial Sequence
  Description of Artificial Sequence: Synthetic peptide
  c-term may be amidated
VPLSRTVRCTCISISNQPVNPRSLEKLEIIPASQF

SEQ ID NO: 179 - protein, 35 aa, Artificial Sequence
  Description of Artificial Sequence: Synthetic peptide
  MOD_RES (1)..(1): Any L- or D-natural amino acid and any non-natural amino acid; see  specification as filed for detail ed description of substitutions, R-groups  and preferred embodiments
  MOD_RES (9)..(9): Any L- or D-natural amino acid and any non-natural amino acid; see  specification as filed for detail ed description of substitutions, R-groups  and preferred embodiments
  MOD_RES (11)..(11): Any L- or D-natural amino acid and any non-natural amino acid; see  specification as filed for detail ed description of substitutions, R-groups  and preferred embodiments
  c-term may be amidated
XPLSRTVRXTXISISNQPVNPRSLEKLEIIPASQF

SEQ ID NO: 180 - protein, 35 aa, Artificial Sequence
  Description of Artificial Sequence: Synthetic peptide
  MOD_RES (2)..(2): Any L- or D-natural amino acid and any non-natural amino acid; see  specification as filed for detail ed description of substitutions, R-groups  and preferred embodiments
  MOD_RES (9)..(9): Any L- or D-natural amino acid and any non-natural amino acid; see  specification as filed for detail ed description of substitutions, R-groups  and preferred embodiments
  MOD_RES (11)..(11): Any L- or D-natural amino acid and any non-natural amino acid; see  specification as filed for detail ed description of substitutions, R-groups  and preferred embodiments
  c-term may be amidated
VXLSRTVRXTXISISNQPVNPRSLEKLEIIPASQF

SEQ ID NO: 181 - protein, 35 aa, Artificial Sequence
  Description of Artificial Sequence: Synthetic peptide
  MOD_RES (3)..(3): Any L- or D-natural amino acid and any non-natural amino acid; see  specification as filed for detail ed description of substitutions, R-groups  and preferred embodiments
  MOD_RES (9)..(9): Any L- or D-natural amino acid and any non-natural amino acid; see  specification as filed for detail ed description of substitutions, R-groups  and preferred embodiments
  MOD_RES (11)..(11): Any L- or D-natural amino acid and any non-natural amino acid; see  specification as filed for detail ed description of substitutions, R-groups  and preferred embodiments
  c-term may be amidated
VPXSRTVRXTXISISNQPVNPRSLEKLEIIPASQF

SEQ ID NO: 182 - protein, 35 aa, Artificial Sequence
  Description of Artificial Sequence: Synthetic peptide
  MOD_RES (4)..(4): Any L- or D-natural amino acid and any non-natural amino acid; see  specification as filed for detail ed description of substitutions, R-groups  and preferred embodiments
  MOD_RES (9)..(9): Any L- or D-natural amino acid and any non-natural amino acid; see  specification as filed for detail ed description of substitutions, R-groups  and preferred embodiments
  MOD_RES (11)..(11): Any L- or D-natural amino acid and any non-natural amino acid; see  specification as filed for detail ed description of substitutions, R-groups  and preferred embodiments
  c-term may be amidated
VPLXRTVRXTXISISNQPVNPRSLEKLEIIPASQF

SEQ ID NO: 183 - protein, 35 aa, Artificial Sequence
  Description of Artificial Sequence: Synthetic peptide
  MOD_RES (5)..(5): Any L- or D-natural amino acid and any non-natural amino acid; see  specification as filed for detail ed description of substitutions, R-groups  and preferred embodiments
  MOD_RES (9)..(9): Any L- or D-natural amino acid and any non-natural amino acid; see  specification as filed for detail ed description of substitutions, R-groups  and preferred embodiments
  MOD_RES (11)..(11): Any L- or D-natural amino acid and any non-natural amino acid; see  specification as filed for detail ed description of substitutions, R-groups  and preferred embodiments
  c-term may be amidated
VPLSXTVRXTXISISNQPVNPRSLEKLEIIPASQF

SEQ ID NO: 184 - protein, 35 aa, Artificial Sequence
  Description of Artificial Sequence: Synthetic peptide
  MOD_RES (6)..(6): Any L- or D-natural amino acid and any non-natural amino acid; see  specification as filed for detail ed description of substitutions, R-groups  and preferred embodiments
  MOD_RES (9)..(9): Any L- or D-natural amino acid and any non-natural amino acid; see  specification as filed for detail ed description of substitutions, R-groups  and preferred embodiments
  MOD_RES (11)..(11): Any L- or D-natural amino acid and any non-natural amino acid; see  specification as filed for detail ed description of substitutions, R-groups  and preferred embodiments
  c-term may be amidated
VPLSRXVRXTXISISNQPVNPRSLEKLEIIPASQF

SEQ ID NO: 185 - protein, 35 aa, Artificial Sequence
  Description of Artificial Sequence: Synthetic peptide
  MOD_RES (7)..(7): Any L- or D-natural amino acid and any non-natural amino acid; see  specification as filed for detail ed description of substitutions, R-groups  and preferred embodiments
  MOD_RES (9)..(9): Any L- or D-natural amino acid and any non-natural amino acid; see  specification as filed for detail ed description of substitutions, R-groups  and preferred embodiments
  MOD_RES (11)..(11): Any L- or D-natural amino acid and any non-natural amino acid; see  specification as filed for detail ed description of substitutions, R-groups  and preferred embodiments
  c-term may be amidated
VPLSRTXRXTXISISNQPVNPRSLEKLEIIPASQF

SEQ ID NO: 186 - protein, 35 aa, Artificial Sequence
  Description of Artificial Sequence: Synthetic peptide
  MOD_RES (8)..(9): Any L- or D-natural amino acid and any non-natural amino acid; see  specification as filed for detail ed description of substitutions, R-groups  and preferred embodiments
  MOD_RES (11)..(11): Any L- or D-natural amino acid and any non-natural amino acid; see  specification as filed for detail ed description of substitutions, R-groups  and preferred embodiments
  c-term may be amidated
VPLSRTVXXTXISISNQPVNPRSLEKLEIIPASQF

SEQ ID NO: 187 - protein, 24 aa, Artificial Sequence
  Description of Artificial Sequence: Synthetic peptide
  c-term may be amidated
LNPESKAIKNLLKAVSKEMSKRSP

SEQ ID NO: 188 - protein, 31 aa, Artificial Sequence
  Description of Artificial Sequence: Synthetic peptide
  MOD_RES (15)..(18): Any L- or D-natural or non-natural amino acid, and this range may  encompass 1 or 4 residues; see spe cification as filed for detailed  description of substitutions, R-groups and preferred embodi
  c-term may be amidated
VPLSRTVRCTCISIXXXXLKAVSKEMSKRSP

SEQ ID NO: 189 - protein, 31 aa, Artificial Sequence
  Description of Artificial Sequence: Synthetic peptide
  MOD_RES (1)..(1): Any L- or D-natural amino acid and any non-natural amino acid; see  specification as filed for detail ed description of substitutions, R-groups  and preferred embodiments
  MOD_RES (9)..(9): Any L- or D-natural amino acid and any non-natural amino acid; see  specification as filed for detail ed description of substitutions, R-groups  and preferred embodiments
  MOD_RES (11)..(11): Any L- or D-natural amino acid and any non-natural amino acid; see  specification as filed for detail ed description of substitutions, R-groups  and preferred embodiments
  MOD_RES (15)..(18): Any L- or D-natural or non-natural amino acid, and this range may  encompass 1 or 4 residues; see spe cification as filed for detailed  description of substitutions, R-groups and preferred embodi
  c-term may be amidated
XPLSRTVRXTXISIXXXXLKAVSKEMSKRSP

SEQ ID NO: 190 - protein, 31 aa, Artificial Sequence
  Description of Artificial Sequence: Synthetic peptide
  MOD_RES (2)..(2): Any L- or D-natural amino acid and any non-natural amino acid; see  specification as filed for detail ed description of substitutions, R-groups  and preferred embodiments
  MOD_RES (9)..(9): Any L- or D-natural amino acid and any non-natural amino acid; see  specification as filed for detail ed description of substitutions, R-groups  and preferred embodiments
  MOD_RES (11)..(11): Any L- or D-natural amino acid and any non-natural amino acid; see  specification as filed for detail ed description of substitutions, R-groups  and preferred embodiments
  MOD_RES (15)..(18): Any L- or D-natural or non-natural amino acid, and this range may  encompass 1 or 4 residues; see spe cification as filed for detailed  description of substitutions, R-groups and preferred embodi
  c-term may be amidated
VXLSRTVRXTXISIXXXXLKAVSKEMSKRSP

SEQ ID NO: 191 - protein, 31 aa, Artificial Sequence
  Description of Artificial Sequence: Synthetic peptide
  MOD_RES (3)..(3): Any L- or D-natural amino acid and any non-natural amino acid; see  specification as filed for detail ed description of substitutions, R-groups  and preferred embodiments
  MOD_RES (9)..(9): Any L- or D-natural amino acid and any non-natural amino acid; see  specification as filed for detail ed description of substitutions, R-groups  and preferred embodiments
  MOD_RES (11)..(11): Any L- or D-natural amino acid and any non-natural amino acid; see  specification as filed for detail ed description of substitutions, R-groups  and preferred embodiments
  MOD_RES (15)..(18): Any L- or D-natural or non-natural amino acid, and this range may  encompass 1 or 4 residues; see spe cification as filed for detailed  description of substitutions, R-groups and preferred embodi
  c-term may be amidated
VPXSRTVRXTXISIXXXXLKAVSKEMSKRSP

SEQ ID NO: 192 - protein, 31 aa, Artificial Sequence
  Description of Artificial Sequence: Synthetic peptide
  MOD_RES (4)..(4): Any L- or D-natural amino acid and any non-natural amino acid; see  specification as filed for detail ed description of substitutions, R-groups  and preferred embodiments
  MOD_RES (9)..(9): Any L- or D-natural amino acid and any non-natural amino acid; see  specification as filed for detail ed description of substitutions, R-groups  and preferred embodiments
  MOD_RES (11)..(11): Any L- or D-natural amino acid and any non-natural amino acid; see  specification as filed for detail ed description of substitutions, R-groups  and preferred embodiments
  MOD_RES (15)..(18): Any L- or D-natural or non-natural amino acid, and this range may  encompass 1 or 4 residues; see spe cification as filed for detailed  description of substitutions, R-groups and preferred embodi
  c-term may be amidated
VPLXRTVRXTXISIXXXXLKAVSKEMSKRSP

SEQ ID NO: 193 - protein, 31 aa, Artificial Sequence
  Description of Artificial Sequence: Synthetic peptide
  MOD_RES (5)..(5): Any L- or D-natural amino acid and any non-natural amino acid; see  specification as filed for detail ed description of substitutions, R-groups  and preferred embodiments
  MOD_RES (9)..(9): Any L- or D-natural amino acid and any non-natural amino acid; see  specification as filed for detail ed description of substitutions, R-groups  and preferred embodiments
  MOD_RES (11)..(11): Any L- or D-natural amino acid and any non-natural amino acid; see  specification as filed for detail ed description of substitutions, R-groups  and preferred embodiments
  MOD_RES (15)..(18): Any L- or D-natural or non-natural amino acid, and this range may  encompass 1 or 4 residues; see spe cification as filed for detailed  description of substitutions, R-groups and preferred embodi
  c-term may be amidated
VPLSXTVRXTXISIXXXXLKAVSKEMSKRSP

SEQ ID NO: 194 - protein, 31 aa, Artificial Sequence
  Description of Artificial Sequence: Synthetic peptide
  MOD_RES (6)..(6): Any L- or D-natural amino acid and any non-natural amino acid; see  specification as filed for detail ed description of substitutions, R-groups  and preferred embodiments
  MOD_RES (9)..(9): Any L- or D-natural amino acid and any non-natural amino acid; see  specification as filed for detail ed description of substitutions, R-groups  and preferred embodiments
  MOD_RES (11)..(11): Any L- or D-natural amino acid and any non-natural amino acid; see  specification as filed for detail ed description of substitutions, R-groups  and preferred embodiments
  MOD_RES (15)..(18): Any L- or D-natural or non-natural amino acid, and this range may  encompass 1 or 4 residues; see spe cification as filed for detailed  description of substitutions, R-groups and preferred embodi
  c-term may be amidated
VPLSRXVRXTXISIXXXXLKAVSKEMSKRSP

SEQ ID NO: 195 - protein, 31 aa, Artificial Sequence
  Description of Artificial Sequence: Synthetic peptide
  MOD_RES (7)..(7): Any L- or D-natural amino acid and any non-natural amino acid; see  specification as filed for detail ed description of substitutions, R-groups  and preferred embodiments
  MOD_RES (9)..(9): Any L- or D-natural amino acid and any non-natural amino acid; see  specification as filed for detail ed description of substitutions, R-groups  and preferred embodiments
  MOD_RES (11)..(11): Any L- or D-natural amino acid and any non-natural amino acid; see  specification as filed for detail ed description of substitutions, R-groups  and preferred embodiments
  MOD_RES (15)..(18): Any L- or D-natural or non-natural amino acid, and this range may  encompass 1 or 4 residues; see spe cification as filed for detailed  description of substitutions, R-groups and preferred embodi
  c-term may be amidated
VPLSRTXRXTXISIXXXXLKAVSKEMSKRSP

SEQ ID NO: 196 - protein, 31 aa, Artificial Sequence
  Description of Artificial Sequence: Synthetic peptide
  MOD_RES (8)..(9): Any L- or D-natural amino acid and any non-natural amino acid; see  specification as filed for detail ed description of substitutions, R-groups  and preferred embodiments
  MOD_RES (11)..(11): Any L- or D-natural amino acid and any non-natural amino acid; see  specification as filed for detail ed description of substitutions, R-groups  and preferred embodiments
  MOD_RES (15)..(18): Any L- or D-natural or non-natural amino acid, and this range may  encompass 1 or 4 residues; see spe cification as filed for detailed  description of substitutions, R-groups and preferred embodi
  c-term may be amidated
VPLSRTVXXTXISIXXXXLKAVSKEMSKRSP

SEQ ID NO: 197 - protein, 31 aa, Artificial Sequence
  Description of Artificial Sequence: Synthetic peptide
  MOD_RES (12)..(12): Any L- or D-natural amino acid and any non-natural amino acid; see  specification as filed for detail ed description of substitutions, R-groups  and preferred embodiments
  MOD_RES (15)..(18): Any L- or D-natural or non-natural amino acid, and this range may  encompass 1 or 4 residues; see spe cification as filed for detailed  description of substitutions, R-groups and preferred embodi
  c-term may be amidated
VPLSRTVRCTCXSIXXXXLKAVSKEMSKRSP

SEQ ID NO: 198 - protein, 31 aa, Artificial Sequence
  Description of Artificial Sequence: Synthetic peptide
  MOD_RES (1)..(1): Any L- or D-natural amino acid and any non-natural amino acid; see  specification as filed for detail ed description of substitutions, R-groups  and preferred embodiments
  MOD_RES (9)..(9): Any L- or D-natural amino acid and any non-natural amino acid; see  specification as filed for detail ed description of substitutions, R-groups  and preferred embodiments
  MOD_RES (11)..(12): Any L- or D-natural amino acid and any non-natural amino acid; see  specification as filed for detail ed description of substitutions, R-groups  and preferred embodiments
  MOD_RES (15)..(18): Any L- or D-natural or non-natural amino acid, and this range may  encompass 1 or 4 residues; see spe cification as filed for detailed  description of substitutions, R-groups and preferred embodi
  c-term may be amidated
XPLSRTVRXTXXSIXXXXLKAVSKEMSKRSP

SEQ ID NO: 199 - protein, 31 aa, Artificial Sequence
  Description of Artificial Sequence: Synthetic peptide
  MOD_RES (2)..(2): Any L- or D-natural amino acid and any non-natural amino acid; see  specification as filed for detail ed description of substitutions, R-groups  and preferred embodiments
  MOD_RES (9)..(9): Any L- or D-natural amino acid and any non-natural amino acid; see  specification as filed for detail ed description of substitutions, R-groups  and preferred embodiments
  MOD_RES (11)..(12): Any L- or D-natural amino acid and any non-natural amino acid; see  specification as filed for detail ed description of substitutions, R-groups  and preferred embodiments
  MOD_RES (15)..(18): Any L- or D-natural or non-natural amino acid, and this range may  encompass 1 or 4 residues; see spe cification as filed for detailed  description of substitutions, R-groups and preferred embodi
  c-term may be amidated
VXLSRTVRXTXXSIXXXXLKAVSKEMSKRSP

SEQ ID NO: 200 - protein, 31 aa, Artificial Sequence
  Description of Artificial Sequence: Synthetic peptide
  MOD_RES (3)..(3): Any L- or D-natural amino acid and any non-natural amino acid; see  specification as filed for detail ed description of substitutions, R-groups  and preferred embodiments
  MOD_RES (9)..(9): Any L- or D-natural amino acid and any non-natural amino acid; see  specification as filed for detail ed description of substitutions, R-groups  and preferred embodiments
  MOD_RES (11)..(12): Any L- or D-natural amino acid and any non-natural amino acid; see  specification as filed for detail ed description of substitutions, R-groups  and preferred embodiments
  MOD_RES (15)..(18): Any L- or D-natural or non-natural amino acid, and this range may  encompass 1 or 4 residues; see spe cification as filed for detailed  description of substitutions, R-groups and preferred embodi
  c-term may be amidated
VPXSRTVRXTXXSIXXXXLKAVSKEMSKRSP

SEQ ID NO: 201 - protein, 31 aa, Artificial Sequence
  Description of Artificial Sequence: Synthetic peptide
  MOD_RES (4)..(4): Any L- or D-natural amino acid and any non-natural amino acid; see  specification as filed for detail ed description of substitutions, R-groups  and preferred embodiments
  MOD_RES (9)..(9): Any L- or D-natural amino acid and any non-natural amino acid; see  specification as filed for detail ed description of substitutions, R-groups  and preferred embodiments
  MOD_RES (11)..(12): Any L- or D-natural amino acid and any non-natural amino acid; see  specification as filed for detail ed description of substitutions, R-groups  and preferred embodiments
  MOD_RES (15)..(18): Any L- or D-natural or non-natural amino acid, and this range may  encompass 1 or 4 residues; see spe cification as filed for detailed  description of substitutions, R-groups and preferred embodi
  c-term may be amidated
VPLXRTVRXTXXSIXXXXLKAVSKEMSKRSP

SEQ ID NO: 202 - protein, 31 aa, Artificial Sequence
  Description of Artificial Sequence: Synthetic peptide
  MOD_RES (5)..(5): Any L- or D-natural amino acid and any non-natural amino acid; see  specification as filed for detail ed description of substitutions, R-groups  and preferred embodiments
  MOD_RES (9)..(9): Any L- or D-natural amino acid and any non-natural amino acid; see  specification as filed for detail ed description of substitutions, R-groups  and preferred embodiments
  MOD_RES (11)..(12): Any L- or D-natural amino acid and any non-natural amino acid; see  specification as filed for detail ed description of substitutions, R-groups  and preferred embodiments
  MOD_RES (15)..(18): Any L- or D-natural or non-natural amino acid, and this range may  encompass 1 or 4 residues; see spe cification as filed for detailed  description of substitutions, R-groups and preferred embodi
  c-term may be amidated
VPLSXTVRXTXXSIXXXXLKAVSKEMSKRSP

SEQ ID NO: 203 - protein, 31 aa, Artificial Sequence
  Description of Artificial Sequence: Synthetic peptide
  MOD_RES (6)..(6): Any L- or D-natural amino acid and any non-natural amino acid; see  specification as filed for detail ed description of substitutions, R-groups  and preferred embodiments
  MOD_RES (9)..(9): Any L- or D-natural amino acid and any non-natural amino acid; see  specification as filed for detail ed description of substitutions, R-groups  and preferred embodiments
  MOD_RES (11)..(12): Any L- or D-natural amino acid and any non-natural amino acid; see  specification as filed for detail ed description of substitutions, R-groups  and preferred embodiments
  MOD_RES (15)..(18): Any L- or D-natural or non-natural amino acid, and this range may  encompass 1 or 4 residues; see spe cification as filed for detailed  description of substitutions, R-groups and preferred embodi
  c-term may be amidated
VPLSRXVRXTXXSIXXXXLKAVSKEMSKRSP

SEQ ID NO: 204 - protein, 31 aa, Artificial Sequence
  Description of Artificial Sequence: Synthetic peptide
  MOD_RES (7)..(7): Any L- or D-natural amino acid and any non-natural amino acid; see  specification as filed for detail ed description of substitutions, R-groups  and preferred embodiments
  MOD_RES (9)..(9): Any L- or D-natural amino acid and any non-natural amino acid; see  specification as filed for detail ed description of substitutions, R-groups  and preferred embodiments
  MOD_RES (11)..(12): Any L- or D-natural amino acid and any non-natural amino acid; see  specification as filed for detail ed description of substitutions, R-groups  and preferred embodiments
  MOD_RES (15)..(18): Any L- or D-natural or non-natural amino acid, and this range may  encompass 1 or 4 residues; see spe cification as filed for detailed  description of substitutions, R-groups and preferred embodi
  c-term may be amidated
VPLSRTXRXTXXSIXXXXLKAVSKEMSKRSP

SEQ ID NO: 205 - protein, 31 aa, Artificial Sequence
  Description of Artificial Sequence: Synthetic peptide
  MOD_RES (8)..(9): Any L- or D-natural amino acid and any non-natural amino acid; see  specification as filed for detail ed description of substitutions, R-groups  and preferred embodiments
  MOD_RES (11)..(12): Any L- or D-natural amino acid and any non-natural amino acid; see  specification as filed for detail ed description of substitutions, R-groups  and preferred embodiments
  MOD_RES (15)..(18): Any L- or D-natural or non-natural amino acid, and this range may  encompass 1 or 4 residues; see spe cification as filed for detailed  description of substitutions, R-groups and preferred embodi
  c-term may be amidated
VPLSRTVXXTXXSIXXXXLKAVSKEMSKRSP

SEQ ID NO: 206 - protein, 31 aa, Artificial Sequence
  Description of Artificial Sequence: Synthetic peptide
  MOD_RES (13)..(13): Any L- or D-natural amino acid and any non-natural amino acid; see  specification as filed for detail ed description of substitutions, R-groups  and preferred embodiments
  MOD_RES (15)..(18): Any L- or D-natural or non-natural amino acid, and this range may  encompass 1 or 4 residues; see spe cification as filed for detailed  description of substitutions, R-groups and preferred embodi
  c-term may be amidated
VPLSRTVRCTCIXIXXXXLKAVSKEMSKRSP

SEQ ID NO: 207 - protein, 31 aa, Artificial Sequence
  Description of Artificial Sequence: Synthetic peptide
  MOD_RES (1)..(1): Any L- or D-natural amino acid and any non-natural amino acid; see  specification as filed for detail ed description of substitutions, R-groups  and preferred embodiments
  MOD_RES (9)..(9): Any L- or D-natural amino acid and any non-natural amino acid; see  specification as filed for detail ed description of substitutions, R-groups  and preferred embodiments
  MOD_RES (11)..(11): Any L- or D-natural amino acid and any non-natural amino acid; see  specification as filed for detail ed description of substitutions, R-groups  and preferred embodiments
  MOD_RES (13)..(13): Any L- or D-natural amino acid and any non-natural amino acid; see  specification as filed for detail ed description of substitutions, R-groups  and preferred embodiments
  MOD_RES (15)..(18): Any L- or D-natural or non-natural amino acid, and this range may  encompass 1 or 4 residues; see spe cification as filed for detailed  description of substitutions, R-groups and preferred embodi
  c-term may be amidated
XPLSRTVRXTXIXIXXXXLKAVSKEMSKRSP

SEQ ID NO: 208 - protein, 31 aa, Artificial Sequence
  Description of Artificial Sequence: Synthetic peptide
  MOD_RES (2)..(2): Any L- or D-natural amino acid and any non-natural amino acid; see  specification as filed for detail ed description of substitutions, R-groups  and preferred embodiments
  MOD_RES (9)..(9): Any L- or D-natural amino acid and any non-natural amino acid; see  specification as filed for detail ed description of substitutions, R-groups  and preferred embodiments
  MOD_RES (11)..(11): Any L- or D-natural amino acid and any non-natural amino acid; see  specification as filed for detail ed description of substitutions, R-groups  and preferred embodiments
  MOD_RES (13)..(13): Any L- or D-natural amino acid and any non-natural amino acid; see  specification as filed for detail ed description of substitutions, R-groups  and preferred embodiments
  MOD_RES (15)..(18): Any L- or D-natural or non-natural amino acid, and this range may  encompass 1 or 4 residues; see spe cification as filed for detailed  description of substitutions, R-groups and preferred embodi
  c-term may be amidated
VXLSRTVRXTXIXIXXXXLKAVSKEMSKRSP

SEQ ID NO: 209 - protein, 31 aa, Artificial Sequence
  Description of Artificial Sequence: Synthetic peptide
  MOD_RES (3)..(3): Any L- or D-natural amino acid and any non-natural amino acid; see  specification as filed for detail ed description of substitutions, R-groups  and preferred embodiments
  MOD_RES (9)..(9): Any L- or D-natural amino acid and any non-natural amino acid; see  specification as filed for detail ed description of substitutions, R-groups  and preferred embodiments
  MOD_RES (11)..(11): Any L- or D-natural amino acid and any non-natural amino acid; see  specification as filed for detail ed description of substitutions, R-groups  and preferred embodiments
  MOD_RES (13)..(13): Any L- or D-natural amino acid and any non-natural amino acid; see  specification as filed for detail ed description of substitutions, R-groups  and preferred embodiments
  MOD_RES (15)..(18): Any L- or D-natural or non-natural amino acid, and this range may  encompass 1 or 4 residues; see spe cification as filed for detailed  description of substitutions, R-groups and preferred embodi
  c-term may be amidated
VPXSRTVRXTXIXIXXXXLKAVSKEMSKRSP

SEQ ID NO: 210 - protein, 31 aa, Artificial Sequence
  Description of Artificial Sequence: Synthetic peptide
  MOD_RES (4)..(4): Any L- or D-natural amino acid and any non-natural amino acid; see  specification as filed for detail ed description of substitutions, R-groups  and preferred embodiments
  MOD_RES (9)..(9): Any L- or D-natural amino acid and any non-natural amino acid; see  specification as filed for detail ed description of substitutions, R-groups  and preferred embodiments
  MOD_RES (11)..(11): Any L- or D-natural amino acid and any non-natural amino acid; see  specification as filed for detail ed description of substitutions, R-groups  and preferred embodiments
  MOD_RES (13)..(13): Any L- or D-natural amino acid and any non-natural amino acid; see  specification as filed for detail ed description of substitutions, R-groups  and preferred embodiments
  MOD_RES (15)..(18): Any L- or D-natural or non-natural amino acid, and this range may  encompass 1 or 4 residues; see spe cification as filed for detailed  description of substitutions, R-groups and preferred embodi
  c-term may be amidated
VPLXRTVRXTXIXIXXXXLKAVSKEMSKRSP

SEQ ID NO: 211 - protein, 31 aa, Artificial Sequence
  Description of Artificial Sequence: Synthetic peptide
  MOD_RES (5)..(5): Any L- or D-natural amino acid and any non-natural amino acid; see  specification as filed for detail ed description of substitutions, R-groups  and preferred embodiments
  MOD_RES (9)..(9): Any L- or D-natural amino acid and any non-natural amino acid; see  specification as filed for detail ed description of substitutions, R-groups  and preferred embodiments
  MOD_RES (11)..(11): Any L- or D-natural amino acid and any non-natural amino acid; see  specification as filed for detail ed description of substitutions, R-groups  and preferred embodiments
  MOD_RES (13)..(13): Any L- or D-natural amino acid and any non-natural amino acid; see  specification as filed for detail ed description of substitutions, R-groups  and preferred embodiments
  MOD_RES (15)..(18): Any L- or D-natural or non-natural amino acid, and this range may  encompass 1 or 4 residues; see spe cification as filed for detailed  description of substitutions, R-groups and preferred embodi
  c-term may be amidated
VPLSXTVRXTXIXIXXXXLKAVSKEMSKRSP

SEQ ID NO: 212 - protein, 31 aa, Artificial Sequence
  Description of Artificial Sequence: Synthetic peptide
  MOD_RES (6)..(6): Any L- or D-natural amino acid and any non-natural amino acid; see  specification as filed for detail ed description of substitutions, R-groups  and preferred embodiments
  MOD_RES (9)..(9): Any L- or D-natural amino acid and any non-natural amino acid; see  specification as filed for detail ed description of substitutions, R-groups  and preferred embodiments
  MOD_RES (11)..(11): Any L- or D-natural amino acid and any non-natural amino acid; see  specification as filed for detail ed description of substitutions, R-groups  and preferred embodiments
  MOD_RES (13)..(13): Any L- or D-natural amino acid and any non-natural amino acid; see  specification as filed for detail ed description of substitutions, R-groups  and preferred embodiments
  MOD_RES (15)..(18): Any L- or D-natural or non-natural amino acid, and this range may  encompass 1 or 4 residues; see spe cification as filed for detailed  description of substitutions, R-groups and preferred embodi
  c-term may be amidated
VPLSRXVRXTXIXIXXXXLKAVSKEMSKRSP

SEQ ID NO: 213 - protein, 31 aa, Artificial Sequence
  Description of Artificial Sequence: Synthetic peptide
  MOD_RES (7)..(7): Any L- or D-natural amino acid and any non-natural amino acid; see  specification as filed for detail ed description of substitutions, R-groups  and preferred embodiments
  MOD_RES (9)..(9): Any L- or D-natural amino acid and any non-natural amino acid; see  specification as filed for detail ed description of substitutions, R-groups  and preferred embodiments
  MOD_RES (11)..(11): Any L- or D-natural amino acid and any non-natural amino acid; see  specification as filed for detail ed description of substitutions, R-groups  and preferred embodiments
  MOD_RES (13)..(13): Any L- or D-natural amino acid and any non-natural amino acid; see  specification as filed for detail ed description of substitutions, R-groups  and preferred embodiments
  MOD_RES (15)..(18): Any L- or D-natural or non-natural amino acid, and this range may  encompass 1 or 4 residues; see spe cification as filed for detailed  description of substitutions, R-groups and preferred embodi
  c-term may be amidated
VPLSRTXRXTXIXIXXXXLKAVSKEMSKRSP

SEQ ID NO: 214 - protein, 31 aa, Artificial Sequence
  Description of Artificial Sequence: Synthetic peptide
  MOD_RES (8)..(9): Any L- or D-natural amino acid and any non-natural amino acid; see  specification as filed for detail ed description of substitutions, R-groups  and preferred embodiments
  MOD_RES (11)..(11): Any L- or D-natural amino acid and any non-natural amino acid; see  specification as filed for detail ed description of substitutions, R-groups  and preferred embodiments
  MOD_RES (13)..(13): Any L- or D-natural amino acid and any non-natural amino acid; see  specification as filed for detail ed description of substitutions, R-groups  and preferred embodiments
  MOD_RES (15)..(18): Any L- or D-natural or non-natural amino acid, and this range may  encompass 1 or 4 residues; see spe cification as filed for detailed  description of substitutions, R-groups and preferred embodi
  c-term may be amidated
VPLSRTVXXTXIXIXXXXLKAVSKEMSKRSP

SEQ ID NO: 215 - protein, 31 aa, Artificial Sequence
  Description of Artificial Sequence: Synthetic peptide
  MOD_RES (14)..(14): Any L- or D-natural amino acid and any non-natural amino acid; see  specification as filed for detail ed description of substitutions, R-groups  and preferred embodiments
  MOD_RES (15)..(18): Any L- or D-natural or non-natural amino acid, and this range may  encompass 1 or 4 residues; see spe cification as filed for detailed  description of substitutions, R-groups and preferred embodi
  c-term may be amidated
VPLSRTVRCTCISXXXXXLKAVSKEMSKRSP

SEQ ID NO: 216 - protein, 31 aa, Artificial Sequence
  Description of Artificial Sequence: Synthetic peptide
  MOD_RES (1)..(1): Any L- or D-natural amino acid and any non-natural amino acid; see  specification as filed for detail ed description of substitutions, R-groups  and preferred embodiments
  MOD_RES (9)..(9): Any L- or D-natural amino acid and any non-natural amino acid; see  specification as filed for detail ed description of substitutions, R-groups  and preferred embodiments
  MOD_RES (11)..(11): Any L- or D-natural amino acid and any non-natural amino acid; see  specification as filed for detail ed description of substitutions, R-groups  and preferred embodiments
  MOD_RES (14)..(14): Any L- or D-natural amino acid and any non-natural amino acid; see  specification as filed for detail ed description of substitutions, R-groups  and preferred embodiments
  MOD_RES (15)..(18): Any L- or D-natural or non-natural amino acid, and this range may  encompass 1 or 4 residues; see spe cification as filed for detailed  description of substitutions, R-groups and preferred embodi
  c-term may be amidated
XPLSRTVRXTXISXXXXXLKAVSKEMSKRSP

SEQ ID NO: 217 - protein, 31 aa, Artificial Sequence
  Description of Artificial Sequence: Synthetic peptide
  MOD_RES (2)..(2): Any L- or D-natural amino acid and any non-natural amino acid; see  specification as filed for detail ed description of substitutions, R-groups  and preferred embodiments
  MOD_RES (9)..(9): Any L- or D-natural amino acid and any non-natural amino acid; see  specification as filed for detail ed description of substitutions, R-groups  and preferred embodiments
  MOD_RES (11)..(11): Any L- or D-natural amino acid and any non-natural amino acid; see  specification as filed for detail ed description of substitutions, R-groups  and preferred embodiments
  MOD_RES (14)..(14): Any L- or D-natural amino acid and any non-natural amino acid; see  specification as filed for detail ed description of substitutions, R-groups  and preferred embodiments
  MOD_RES (15)..(18): Any L- or D-natural or non-natural amino acid, and this range may  encompass 1 or 4 residues; see spe cification as filed for detailed  description of substitutions, R-groups and preferred embodi
  c-term may be amidated
VXLSRTVRXTXISXXXXXLKAVSKEMSKRSP

SEQ ID NO: 218 - protein, 31 aa, Artificial Sequence
  Description of Artificial Sequence: Synthetic peptide
  MOD_RES (3)..(3): Any L- or D-natural amino acid and any non-natural amino acid; see  specification as filed for detail ed description of substitutions, R-groups  and preferred embodiments
  MOD_RES (9)..(9): Any L- or D-natural amino acid and any non-natural amino acid; see  specification as filed for detail ed description of substitutions, R-groups  and preferred embodiments
  MOD_RES (11)..(11): Any L- or D-natural amino acid and any non-natural amino acid; see  specification as filed for detail ed description of substitutions, R-groups  and preferred embodiments
  MOD_RES (14)..(14): Any L- or D-natural amino acid and any non-natural amino acid; see  specification as filed for detail ed description of substitutions, R-groups  and preferred embodiments
  MOD_RES (15)..(18): Any L- or D-natural or non-natural amino acid, and this range may  encompass 1 or 4 residues; see spe cification as filed for detailed  description of substitutions, R-groups and preferred embodi
  c-term may be amidated
VPXSRTVRXTXISXXXXXLKAVSKEMSKRSP

SEQ ID NO: 219 - protein, 31 aa, Artificial Sequence
  Description of Artificial Sequence: Synthetic peptide
  MOD_RES (4)..(4): Any L- or D-natural amino acid and any non-natural amino acid; see  specification as filed for detail ed description of substitutions, R-groups  and preferred embodiments
  MOD_RES (9)..(9): Any L- or D-natural amino acid and any non-natural amino acid; see  specification as filed for detail ed description of substitutions, R-groups  and preferred embodiments
  MOD_RES (11)..(11): Any L- or D-natural amino acid and any non-natural amino acid; see  specification as filed for detail ed description of substitutions, R-groups  and preferred embodiments
  MOD_RES (14)..(14): Any L- or D-natural amino acid and any non-natural amino acid; see  specification as filed for detail ed description of substitutions, R-groups  and preferred embodiments
  MOD_RES (15)..(18): Any L- or D-natural or non-natural amino acid, and this range may  encompass 1 or 4 residues; see spe cification as filed for detailed  description of substitutions, R-groups and preferred embodi
  c-term may be amidated
VPLXRTVRXTXISXXXXXLKAVSKEMSKRSP

SEQ ID NO: 220 - protein, 31 aa, Artificial Sequence
  Description of Artificial Sequence: Synthetic peptide
  MOD_RES (5)..(5): Any L- or D-natural amino acid and any non-natural amino acid; see  specification as filed for detail ed description of substitutions, R-groups  and preferred embodiments
  MOD_RES (9)..(9): Any L- or D-natural amino acid and any non-natural amino acid; see  specification as filed for detail ed description of substitutions, R-groups  and preferred embodiments
  MOD_RES (11)..(11): Any L- or D-natural amino acid and any non-natural amino acid; see  specification as filed for detail ed description of substitutions, R-groups  and preferred embodiments
  MOD_RES (14)..(14): Any L- or D-natural amino acid and any non-natural amino acid; see  specification as filed for detail ed description of substitutions, R-groups  and preferred embodiments
  MOD_RES (15)..(18): Any L- or D-natural or non-natural amino acid, and this range may  encompass 1 or 4 residues; see spe cification as filed for detailed  description of substitutions, R-groups and preferred embodi
  c-term may be amidated
VPLSXTVRXTXISXXXXXLKAVSKEMSKRSP

SEQ ID NO: 221 - protein, 31 aa, Artificial Sequence
  Description of Artificial Sequence: Synthetic peptide
  MOD_RES (6)..(6): Any L- or D-natural amino acid and any non-natural amino acid; see  specification as filed for detail ed description of substitutions, R-groups  and preferred embodiments
  MOD_RES (9)..(9): Any L- or D-natural amino acid and any non-natural amino acid; see  specification as filed for detail ed description of substitutions, R-groups  and preferred embodiments
  MOD_RES (11)..(11): Any L- or D-natural amino acid and any non-natural amino acid; see  specification as filed for detail ed description of substitutions, R-groups  and preferred embodiments
  MOD_RES (14)..(14): Any L- or D-natural amino acid and any non-natural amino acid; see  specification as filed for detail ed description of substitutions, R-groups  and preferred embodiments
  MOD_RES (15)..(18): Any L- or D-natural or non-natural amino acid, and this range may  encompass 1 or 4 residues; see spe cification as filed for detailed  description of substitutions, R-groups and preferred embodi
  c-term may be amidated
VPLSRXVRXTXISXXXXXLKAVSKEMSKRSP

SEQ ID NO: 222 - protein, 31 aa, Artificial Sequence
  Description of Artificial Sequence: Synthetic peptide
  MOD_RES (7)..(7): Any L- or D-natural amino acid and any non-natural amino acid; see  specification as filed for detail ed description of substitutions, R-groups  and preferred embodiments
  MOD_RES (9)..(9): Any L- or D-natural amino acid and any non-natural amino acid; see  specification as filed for detail ed description of substitutions, R-groups  and preferred embodiments
  MOD_RES (11)..(11): Any L- or D-natural amino acid and any non-natural amino acid; see  specification as filed for detail ed description of substitutions, R-groups  and preferred embodiments
  MOD_RES (14)..(14): Any L- or D-natural amino acid and any non-natural amino acid; see  specification as filed for detail ed description of substitutions, R-groups  and preferred embodiments
  MOD_RES (15)..(18): Any L- or D-natural or non-natural amino acid, and this range may  encompass 1 or 4 residues; see spe cification as filed for detailed  description of substitutions, R-groups and preferred embodi
  c-term may be amidated
VPLSRTXRXTXISXXXXXLKAVSKEMSKRSP

SEQ ID NO: 223 - protein, 31 aa, Artificial Sequence
  Description of Artificial Sequence: Synthetic peptide
  MOD_RES (8)..(9): Any L- or D-natural amino acid and any non-natural amino acid; see  specification as filed for detail ed description of substitutions, R-groups  and preferred embodiments
  MOD_RES (11)..(11): Any L- or D-natural amino acid and any non-natural amino acid; see  specification as filed for detail ed description of substitutions, R-groups  and preferred embodiments
  MOD_RES (14)..(14): Any L- or D-natural amino acid and any non-natural amino acid; see  specification as filed for detail ed description of substitutions, R-groups  and preferred embodiments
  MOD_RES (15)..(18): Any L- or D-natural or non-natural amino acid, and this range may  encompass 1 or 4 residues; see spe cification as filed for detailed  description of substitutions, R-groups and preferred embodi
  c-term may be amidated
VPLSRTVXXTXISXXXXXLKAVSKEMSKRSP

SEQ ID NO: 224 - protein, 31 aa, Artificial Sequence
  Description of Artificial Sequence: Synthetic peptide
  MOD_RES (15)..(18): Any L- or D-natural or non-natural amino acid, and this range may  encompass 1 or 4 residues; see spe cification as filed for detailed  description of substitutions, R-groups and preferred embodi
  c-term may be amidated
VPLSRTVRCTCISIXXXXLNPESKAIKNLLK

SEQ ID NO: 225 - protein, 31 aa, Artificial Sequence
  Description of Artificial Sequence: Synthetic peptide
  MOD_RES (1)..(1): Any L- or D-natural amino acid and any non-natural amino acid; see  specification as filed for detail ed description of substitutions, R-groups  and preferred embodiments
  MOD_RES (9)..(9): Any L- or D-natural amino acid and any non-natural amino acid; see  specification as filed for detail ed description of substitutions, R-groups  and preferred embodiments
  MOD_RES (11)..(11): Any L- or D-natural amino acid and any non-natural amino acid; see  specification as filed for detail ed description of substitutions, R-groups  and preferred embodiments
  MOD_RES (15)..(18): Any L- or D-natural or non-natural amino acid, and this range may  encompass 1 or 4 residues; see spe cification as filed for detailed  description of substitutions, R-groups and preferred embodi
  c-term may be amidated
XPLSRTVRXTXISIXXXXLNPESKAIKNLLK

SEQ ID NO: 226 - protein, 31 aa, Artificial Sequence
  Description of Artificial Sequence: Synthetic peptide
  MOD_RES (2)..(2): Any L- or D-natural amino acid and any non-natural amino acid; see  specification as filed for detail ed description of substitutions, R-groups  and preferred embodiments
  MOD_RES (9)..(9): Any L- or D-natural amino acid and any non-natural amino acid; see  specification as filed for detail ed description of substitutions, R-groups  and preferred embodiments
  MOD_RES (11)..(11): Any L- or D-natural amino acid and any non-natural amino acid; see  specification as filed for detail ed description of substitutions, R-groups  and preferred embodiments
  MOD_RES (15)..(18): Any L- or D-natural or non-natural amino acid, and this range may  encompass 1 or 4 residues; see spe cification as filed for detailed  description of substitutions, R-groups and preferred embodi
  c-term may be amidated
VXLSRTVRXTXISIXXXXLNPESKAIKNLLK

SEQ ID NO: 227 - protein, 31 aa, Artificial Sequence
  Description of Artificial Sequence: Synthetic peptide
  MOD_RES (3)..(3): Any L- or D-natural amino acid and any non-natural amino acid; see  specification as filed for detail ed description of substitutions, R-groups  and preferred embodiments
  MOD_RES (9)..(9): Any L- or D-natural amino acid and any non-natural amino acid; see  specification as filed for detail ed description of substitutions, R-groups  and preferred embodiments
  MOD_RES (11)..(11): Any L- or D-natural amino acid and any non-natural amino acid; see  specification as filed for detail ed description of substitutions, R-groups  and preferred embodiments
  MOD_RES (15)..(18): Any L- or D-natural or non-natural amino acid, and this range may  encompass 1 or 4 residues; see spe cification as filed for detailed  description of substitutions, R-groups and preferred embodi
  c-term may be amidated
VPXSRTVRXTXISIXXXXLNPESKAIKNLLK

SEQ ID NO: 228 - protein, 31 aa, Artificial Sequence
  Description of Artificial Sequence: Synthetic peptide
  MOD_RES (4)..(4): Any L- or D-natural amino acid and any non-natural amino acid; see  specification as filed for detail ed description of substitutions, R-groups  and preferred embodiments
  MOD_RES (9)..(9): Any L- or D-natural amino acid and any non-natural amino acid; see  specification as filed for detail ed description of substitutions, R-groups  and preferred embodiments
  MOD_RES (11)..(11): Any L- or D-natural amino acid and any non-natural amino acid; see  specification as filed for detail ed description of substitutions, R-groups  and preferred embodiments
  MOD_RES (15)..(18): Any L- or D-natural or non-natural amino acid, and this range may  encompass 1 or 4 residues; see spe cification as filed for detailed  description of substitutions, R-groups and preferred embodi
  c-term may be amidated
VPLXRTVRXTXISIXXXXLNPESKAIKNLLK

SEQ ID NO: 229 - protein, 31 aa, Artificial Sequence
  Description of Artificial Sequence: Synthetic peptide
  MOD_RES (5)..(5): Any L- or D-natural amino acid and any non-natural amino acid; see  specification as filed for detail ed description of substitutions, R-groups  and preferred embodiments
  MOD_RES (9)..(9): Any L- or D-natural amino acid and any non-natural amino acid; see  specification as filed for detail ed description of substitutions, R-groups  and preferred embodiments
  MOD_RES (11)..(11): Any L- or D-natural amino acid and any non-natural amino acid; see  specification as filed for detail ed description of substitutions, R-groups  and preferred embodiments
  MOD_RES (15)..(18): Any L- or D-natural or non-natural amino acid, and this range may  encompass 1 or 4 residues; see spe cification as filed for detailed  description of substitutions, R-groups and preferred embodi
  c-term may be amidated
VPLSXTVRXTXISIXXXXLNPESKAIKNLLK

SEQ ID NO: 230 - protein, 31 aa, Artificial Sequence
  Description of Artificial Sequence: Synthetic peptide
  MOD_RES (6)..(6): Any L- or D-natural amino acid and any non-natural amino acid; see  specification as filed for detail ed description of substitutions, R-groups  and preferred embodiments
  MOD_RES (9)..(9): Any L- or D-natural amino acid and any non-natural amino acid; see  specification as filed for detail ed description of substitutions, R-groups  and preferred embodiments
  MOD_RES (11)..(11): Any L- or D-natural amino acid and any non-natural amino acid; see  specification as filed for detail ed description of substitutions, R-groups  and preferred embodiments
  MOD_RES (15)..(18): Any L- or D-natural or non-natural amino acid, and this range may  encompass 1 or 4 residues; see spe cification as filed for detailed  description of substitutions, R-groups and preferred embodi
  c-term may be amidated
VPLSRXVRXTXISIXXXXLNPESKAIKNLLK

SEQ ID NO: 231 - protein, 31 aa, Artificial Sequence
  Description of Artificial Sequence: Synthetic peptide
  MOD_RES (7)..(7): Any L- or D-natural amino acid and any non-natural amino acid; see  specification as filed for detail ed description of substitutions, R-groups  and preferred embodiments
  MOD_RES (9)..(9): Any L- or D-natural amino acid and any non-natural amino acid; see  specification as filed for detail ed description of substitutions, R-groups  and preferred embodiments
  MOD_RES (11)..(11): Any L- or D-natural amino acid and any non-natural amino acid; see  specification as filed for detail ed description of substitutions, R-groups  and preferred embodiments
  MOD_RES (15)..(18): Any L- or D-natural or non-natural amino acid, and this range may  encompass 1 or 4 residues; see spe cification as filed for detailed  description of substitutions, R-groups and preferred embodi
  c-term may be amidated
VPLSRTXRXTXISIXXXXLNPESKAIKNLLK

SEQ ID NO: 232 - protein, 31 aa, Artificial Sequence
  Description of Artificial Sequence: Synthetic peptide
  MOD_RES (8)..(9): Any L- or D-natural amino acid and any non-natural amino acid; see  specification as filed for detail ed description of substitutions, R-groups  and preferred embodiments
  MOD_RES (11)..(11): Any L- or D-natural amino acid and any non-natural amino acid; see  specification as filed for detail ed description of substitutions, R-groups  and preferred embodiments
  MOD_RES (15)..(18): Any L- or D-natural or non-natural amino acid, and this range may  encompass 1 or 4 residues; see spe cification as filed for detailed  description of substitutions, R-groups and preferred embodi
  c-term may be amidated
VPLSRTVXXTXISIXXXXLNPESKAIKNLLK

SEQ ID NO: 233 - protein, 31 aa, Artificial Sequence
  Description of Artificial Sequence: Synthetic peptide
  MOD_RES (12)..(12): Any L- or D-natural amino acid and any non-natural amino acid; see  specification as filed for detail ed description of substitutions, R-groups  and preferred embodiments
  MOD_RES (15)..(18): Any L- or D-natural or non-natural amino acid, and this range may  encompass 1 or 4 residues; see spe cification as filed for detailed  description of substitutions, R-groups and preferred embodi
  c-term may be amidated
VPLSRTVRCTCXSIXXXXLNPESKAIKNLLK

SEQ ID NO: 234 - protein, 31 aa, Artificial Sequence
  Description of Artificial Sequence: Synthetic peptide
  MOD_RES (1)..(1): Any L- or D-natural amino acid and any non-natural amino acid; see  specification as filed for detail ed description of substitutions, R-groups  and preferred embodiments
  MOD_RES (9)..(9): Any L- or D-natural amino acid and any non-natural amino acid; see  specification as filed for detail ed description of substitutions, R-groups  and preferred embodiments
  MOD_RES (11)..(12): Any L- or D-natural amino acid and any non-natural amino acid; see  specification as filed for detail ed description of substitutions, R-groups  and preferred embodiments
  MOD_RES (15)..(18): Any L- or D-natural or non-natural amino acid, and this range may  encompass 1 or 4 residues; see spe cification as filed for detailed  description of substitutions, R-groups and preferred embodi
  c-term may be amidated
XPLSRTVRXTXXSIXXXXLNPESKAIKNLLK

SEQ ID NO: 235 - protein, 31 aa, Artificial Sequence
  Description of Artificial Sequence: Synthetic peptide
  MOD_RES (2)..(2): Any L- or D-natural amino acid and any non-natural amino acid; see  specification as filed for detail ed description of substitutions, R-groups  and preferred embodiments
  MOD_RES (9)..(9): Any L- or D-natural amino acid and any non-natural amino acid; see  specification as filed for detail ed description of substitutions, R-groups  and preferred embodiments
  MOD_RES (11)..(12): Any L- or D-natural amino acid and any non-natural amino acid; see  specification as filed for detail ed description of substitutions, R-groups  and preferred embodiments
  MOD_RES (15)..(18): Any L- or D-natural or non-natural amino acid, and this range may  encompass 1 or 4 residues; see spe cification as filed for detailed  description of substitutions, R-groups and preferred embodi
  c-term may be amidated
VXLSRTVRXTXXSIXXXXLNPESKAIKNLLK

SEQ ID NO: 236 - protein, 31 aa, Artificial Sequence
  Description of Artificial Sequence: Synthetic peptide
  MOD_RES (3)..(3): Any L- or D-natural amino acid and any non-natural amino acid; see  specification as filed for detail ed description of substitutions, R-groups  and preferred embodiments
  MOD_RES (9)..(9): Any L- or D-natural amino acid and any non-natural amino acid; see  specification as filed for detail ed description of substitutions, R-groups  and preferred embodiments
  MOD_RES (11)..(12): Any L- or D-natural amino acid and any non-natural amino acid; see  specification as filed for detail ed description of substitutions, R-groups  and preferred embodiments
  MOD_RES (15)..(18): Any L- or D-natural or non-natural amino acid, and this range may  encompass 1 or 4 residues; see spe cification as filed for detailed  description of substitutions, R-groups and preferred embodi
  c-term may be amidated
VPXSRTVRXTXXSIXXXXLNPESKAIKNLLK

SEQ ID NO: 237 - protein, 31 aa, Artificial Sequence
  Description of Artificial Sequence: Synthetic peptide
  MOD_RES (4)..(4): Any L- or D-natural amino acid and any non-natural amino acid; see  specification as filed for detail ed description of substitutions, R-groups  and preferred embodiments
  MOD_RES (9)..(9): Any L- or D-natural amino acid and any non-natural amino acid; see  specification as filed for detail ed description of substitutions, R-groups  and preferred embodiments
  MOD_RES (11)..(12): Any L- or D-natural amino acid and any non-natural amino acid; see  specification as filed for detail ed description of substitutions, R-groups  and preferred embodiments
  MOD_RES (15)..(18): Any L- or D-natural or non-natural amino acid, and this range may  encompass 1 or 4 residues; see spe cification as filed for detailed  description of substitutions, R-groups and preferred embodi
  c-term may be amidated
VPLXRTVRXTXXSIXXXXLNPESKAIKNLLK

SEQ ID NO: 238 - protein, 31 aa, Artificial Sequence
  Description of Artificial Sequence: Synthetic peptide
  MOD_RES (5)..(5): Any L- or D-natural amino acid and any non-natural amino acid; see  specification as filed for detail ed description of substitutions, R-groups  and preferred embodiments
  MOD_RES (9)..(9): Any L- or D-natural amino acid and any non-natural amino acid; see  specification as filed for detail ed description of substitutions, R-groups  and preferred embodiments
  MOD_RES (11)..(12): Any L- or D-natural amino acid and any non-natural amino acid; see  specification as filed for detail ed description of substitutions, R-groups  and preferred embodiments
  MOD_RES (15)..(18): Any L- or D-natural or non-natural amino acid, and this range may  encompass 1 or 4 residues; see spe cification as filed for detailed  description of substitutions, R-groups and preferred embodi
  c-term may be amidated
VPLSXTVRXTXXSIXXXXLNPESKAIKNLLK

SEQ ID NO: 239 - protein, 31 aa, Artificial Sequence
  Description of Artificial Sequence: Synthetic peptide
  MOD_RES (6)..(6): Any L- or D-natural amino acid and any non-natural amino acid; see  specification as filed for detail ed description of substitutions, R-groups  and preferred embodiments
  MOD_RES (9)..(9): Any L- or D-natural amino acid and any non-natural amino acid; see  specification as filed for detail ed description of substitutions, R-groups  and preferred embodiments
  MOD_RES (11)..(12): Any L- or D-natural amino acid and any non-natural amino acid; see  specification as filed for detail ed description of substitutions, R-groups  and preferred embodiments
  MOD_RES (15)..(18): Any L- or D-natural or non-natural amino acid, and this range may  encompass 1 or 4 residues; see spe cification as filed for detailed  description of substitutions, R-groups and preferred embodi
  c-term may be amidated
VPLSRXVRXTXXSIXXXXLNPESKAIKNLLK

SEQ ID NO: 240 - protein, 31 aa, Artificial Sequence
  Description of Artificial Sequence: Synthetic peptide
  MOD_RES (7)..(7): Any L- or D-natural amino acid and any non-natural amino acid; see  specification as filed for detail ed description of substitutions, R-groups  and preferred embodiments
  MOD_RES (9)..(9): Any L- or D-natural amino acid and any non-natural amino acid; see  specification as filed for detail ed description of substitutions, R-groups  and preferred embodiments
  MOD_RES (11)..(12): Any L- or D-natural amino acid and any non-natural amino acid; see  specification as filed for detail ed description of substitutions, R-groups  and preferred embodiments
  MOD_RES (15)..(18): Any L- or D-natural or non-natural amino acid, and this range may  encompass 1 or 4 residues; see spe cification as filed for detailed  description of substitutions, R-groups and preferred embodi
  c-term may be amidated
VPLSRTXRXTXXSIXXXXLNPESKAIKNLLK

SEQ ID NO: 241 - protein, 31 aa, Artificial Sequence
  Description of Artificial Sequence: Synthetic peptide
  MOD_RES (8)..(9): Any L- or D-natural amino acid and any non-natural amino acid; see  specification as filed for detail ed description of substitutions, R-groups  and preferred embodiments
  MOD_RES (11)..(12): Any L- or D-natural amino acid and any non-natural amino acid; see  specification as filed for detail ed description of substitutions, R-groups  and preferred embodiments
  MOD_RES (15)..(18): Any L- or D-natural or non-natural amino acid, and this range may  encompass 1 or 4 residues; see spe cification as filed for detailed  description of substitutions, R-groups and preferred embodi
  c-term may be amidated
VPLSRTVXXTXXSIXXXXLNPESKAIKNLLK

SEQ ID NO: 242 - protein, 31 aa, Artificial Sequence
  Description of Artificial Sequence: Synthetic peptide
  MOD_RES (13)..(13): Any L- or D-natural amino acid and any non-natural amino acid; see  specification as filed for detail ed description of substitutions, R-groups  and preferred embodiments
  MOD_RES (15)..(18): Any L- or D-natural or non-natural amino acid, and this range may  encompass 1 or 4 residues; see spe cification as filed for detailed  description of substitutions, R-groups and preferred embodi
  c-term may be amidated
VPLSRTVRCTCIXIXXXXLNPESKAIKNLLK

SEQ ID NO: 243 - protein, 31 aa, Artificial Sequence
  Description of Artificial Sequence: Synthetic peptide
  MOD_RES (1)..(1): Any L- or D-natural amino acid and any non-natural amino acid; see  specification as filed for detail ed description of substitutions, R-groups  and preferred embodiments
  MOD_RES (9)..(9): Any L- or D-natural amino acid and any non-natural amino acid; see  specification as filed for detail ed description of substitutions, R-groups  and preferred embodiments
  MOD_RES (11)..(11): Any L- or D-natural amino acid and any non-natural amino acid; see  specification as filed for detail ed description of substitutions, R-groups  and preferred embodiments
  MOD_RES (13)..(13): Any L- or D-natural amino acid and any non-natural amino acid; see  specification as filed for detail ed description of substitutions, R-groups  and preferred embodiments
  MOD_RES (15)..(18): Any L- or D-natural or non-natural amino acid, and this range may  encompass 1 or 4 residues; see spe cification as filed for detailed  description of substitutions, R-groups and preferred embodi
  c-term may be amidated
XPLSRTVRXTXIXIXXXXLNPESKAIKNLLK

SEQ ID NO: 244 - protein, 31 aa, Artificial Sequence
  Description of Artificial Sequence: Synthetic peptide
  MOD_RES (2)..(2): Any L- or D-natural amino acid and any non-natural amino acid; see  specification as filed for detail ed description of substitutions, R-groups  and preferred embodiments
  MOD_RES (9)..(9): Any L- or D-natural amino acid and any non-natural amino acid; see  specification as filed for detail ed description of substitutions, R-groups  and preferred embodiments
  MOD_RES (11)..(11): Any L- or D-natural amino acid and any non-natural amino acid; see  specification as filed for detail ed description of substitutions, R-groups  and preferred embodiments
  MOD_RES (13)..(13): Any L- or D-natural amino acid and any non-natural amino acid; see  specification as filed for detail ed description of substitutions, R-groups  and preferred embodiments
  MOD_RES (15)..(18): Any L- or D-natural or non-natural amino acid, and this range may  encompass 1 or 4 residues; see spe cification as filed for detailed  description of substitutions, R-groups and preferred embodi
  c-term may be amidated
VXLSRTVRXTXIXIXXXXLNPESKAIKNLLK

SEQ ID NO: 245 - protein, 31 aa, Artificial Sequence
  Description of Artificial Sequence: Synthetic peptide
  MOD_RES (3)..(3): Any L- or D-natural amino acid and any non-natural amino acid; see  specification as filed for detail ed description of substitutions, R-groups  and preferred embodiments
  MOD_RES (9)..(9): Any L- or D-natural amino acid and any non-natural amino acid; see  specification as filed for detail ed description of substitutions, R-groups  and preferred embodiments
  MOD_RES (11)..(11): Any L- or D-natural amino acid and any non-natural amino acid; see  specification as filed for detail ed description of substitutions, R-groups  and preferred embodiments
  MOD_RES (13)..(13): Any L- or D-natural amino acid and any non-natural amino acid; see  specification as filed for detail ed description of substitutions, R-groups  and preferred embodiments
  MOD_RES (15)..(18): Any L- or D-natural or non-natural amino acid, and this range may  encompass 1 or 4 residues; see spe cification as filed for detailed  description of substitutions, R-groups and preferred embodi
  c-term may be amidated
VPXSRTVRXTXIXIXXXXLNPESKAIKNLLK

SEQ ID NO: 246 - protein, 31 aa, Artificial Sequence
  Description of Artificial Sequence: Synthetic peptide
  MOD_RES (4)..(4): Any L- or D-natural amino acid and any non-natural amino acid; see  specification as filed for detail ed description of substitutions, R-groups  and preferred embodiments
  MOD_RES (9)..(9): Any L- or D-natural amino acid and any non-natural amino acid; see  specification as filed for detail ed description of substitutions, R-groups  and preferred embodiments
  MOD_RES (11)..(11): Any L- or D-natural amino acid and any non-natural amino acid; see  specification as filed for detail ed description of substitutions, R-groups  and preferred embodiments
  MOD_RES (13)..(13): Any L- or D-natural amino acid and any non-natural amino acid; see  specification as filed for detail ed description of substitutions, R-groups  and preferred embodiments
  MOD_RES (15)..(18): Any L- or D-natural or non-natural amino acid, and this range may  encompass 1 or 4 residues; see spe cification as filed for detailed  description of substitutions, R-groups and preferred embodi
  c-term may be amidated
VPLXRTVRXTXIXIXXXXLNPESKAIKNLLK

SEQ ID NO: 247 - protein, 31 aa, Artificial Sequence
  Description of Artificial Sequence: Synthetic peptide
  MOD_RES (5)..(5): Any L- or D-natural amino acid and any non-natural amino acid; see  specification as filed for detail ed description of substitutions, R-groups  and preferred embodiments
  MOD_RES (9)..(9): Any L- or D-natural amino acid and any non-natural amino acid; see  specification as filed for detail ed description of substitutions, R-groups  and preferred embodiments
  MOD_RES (11)..(11): Any L- or D-natural amino acid and any non-natural amino acid; see  specification as filed for detail ed description of substitutions, R-groups  and preferred embodiments
  MOD_RES (13)..(13): Any L- or D-natural amino acid and any non-natural amino acid; see  specification as filed for detail ed description of substitutions, R-groups  and preferred embodiments
  MOD_RES (15)..(18): Any L- or D-natural or non-natural amino acid, and this range may  encompass 1 or 4 residues; see spe cification as filed for detailed  description of substitutions, R-groups and preferred embodi
  c-term may be amidated
VPLSXTVRXTXIXIXXXXLNPESKAIKNLLK

SEQ ID NO: 248 - protein, 31 aa, Artificial Sequence
  Description of Artificial Sequence: Synthetic peptide
  MOD_RES (6)..(6): Any L- or D-natural amino acid and any non-natural amino acid; see  specification as filed for detail ed description of substitutions, R-groups  and preferred embodiments
  MOD_RES (9)..(9): Any L- or D-natural amino acid and any non-natural amino acid; see  specification as filed for detail ed description of substitutions, R-groups  and preferred embodiments
  MOD_RES (11)..(11): Any L- or D-natural amino acid and any non-natural amino acid; see  specification as filed for detail ed description of substitutions, R-groups  and preferred embodiments
  MOD_RES (13)..(13): Any L- or D-natural amino acid and any non-natural amino acid; see  specification as filed for detail ed description of substitutions, R-groups  and preferred embodiments
  MOD_RES (15)..(18): Any L- or D-natural or non-natural amino acid, and this range may  encompass 1 or 4 residues; see spe cification as filed for detailed  description of substitutions, R-groups and preferred embodi
  c-term may be amidated
VPLSRXVRXTXIXIXXXXLNPESKAIKNLLK

SEQ ID NO: 249 - protein, 31 aa, Artificial Sequence
  Description of Artificial Sequence: Synthetic peptide
  MOD_RES (7)..(7): Any L- or D-natural amino acid and any non-natural amino acid; see  specification as filed for detail ed description of substitutions, R-groups  and preferred embodiments
  MOD_RES (9)..(9): Any L- or D-natural amino acid and any non-natural amino acid; see  specification as filed for detail ed description of substitutions, R-groups  and preferred embodiments
  MOD_RES (11)..(11): Any L- or D-natural amino acid and any non-natural amino acid; see  specification as filed for detail ed description of substitutions, R-groups  and preferred embodiments
  MOD_RES (13)..(13): Any L- or D-natural amino acid and any non-natural amino acid; see  specification as filed for detail ed description of substitutions, R-groups  and preferred embodiments
  MOD_RES (15)..(18): Any L- or D-natural or non-natural amino acid, and this range may  encompass 1 or 4 residues; see spe cification as filed for detailed  description of substitutions, R-groups and preferred embodi
  c-term may be amidated
VPLSRTXRXTXIXIXXXXLNPESKAIKNLLK

SEQ ID NO: 250 - protein, 31 aa, Artificial Sequence
  Description of Artificial Sequence: Synthetic peptide
  MOD_RES (8)..(9): Any L- or D-natural amino acid and any non-natural amino acid; see  specification as filed for detail ed description of substitutions, R-groups  and preferred embodiments
  MOD_RES (11)..(11): Any L- or D-natural amino acid and any non-natural amino acid; see  specification as filed for detail ed description of substitutions, R-groups  and preferred embodiments
  MOD_RES (13)..(13): Any L- or D-natural amino acid and any non-natural amino acid; see  specification as filed for detail ed description of substitutions, R-groups  and preferred embodiments
  MOD_RES (15)..(18): Any L- or D-natural or non-natural amino acid, and this range may  encompass 1 or 4 residues; see spe cification as filed for detailed  description of substitutions, R-groups and preferred embodi
  c-term may be amidated
VPLSRTVXXTXIXIXXXXLNPESKAIKNLLK

SEQ ID NO: 251 - protein, 31 aa, Artificial Sequence
  Description of Artificial Sequence: Synthetic peptide
  MOD_RES (14)..(14): Any L- or D-natural amino acid and any non-natural amino acid; see  specification as filed for detail ed description of substitutions, R-groups  and preferred embodiments
  MOD_RES (15)..(18): Any L- or D-natural or non-natural amino acid, and this range may  encompass 1 or 4 residues; see spe cification as filed for detailed  description of substitutions, R-groups and preferred embodi
  c-term may be amidated
VPLSRTVRCTCISXXXXXLNPESKAIKNLLK

SEQ ID NO: 252 - protein, 31 aa, Artificial Sequence
  Description of Artificial Sequence: Synthetic peptide
  MOD_RES (1)..(1): Any L- or D-natural amino acid and any non-natural amino acid; see  specification as filed for detail ed description of substitutions, R-groups  and preferred embodiments
  MOD_RES (9)..(9): Any L- or D-natural amino acid and any non-natural amino acid; see  specification as filed for detail ed description of substitutions, R-groups  and preferred embodiments
  MOD_RES (11)..(11): Any L- or D-natural amino acid and any non-natural amino acid; see  specification as filed for detail ed description of substitutions, R-groups  and preferred embodiments
  MOD_RES (14)..(14): Any L- or D-natural amino acid and any non-natural amino acid; see  specification as filed for detail ed description of substitutions, R-groups  and preferred embodiments
  MOD_RES (15)..(18): Any L- or D-natural or non-natural amino acid, and this range may  encompass 1 or 4 residues; see spe cification as filed for detailed  description of substitutions, R-groups and preferred embodi
  c-term may be amidated
XPLSRTVRXTXISXXXXXLNPESKAIKNLLK

SEQ ID NO: 253 - protein, 31 aa, Artificial Sequence
  Description of Artificial Sequence: Synthetic peptide
  MOD_RES (2)..(2): Any L- or D-natural amino acid and any non-natural amino acid; see  specification as filed for detail ed description of substitutions, R-groups  and preferred embodiments
  MOD_RES (9)..(9): Any L- or D-natural amino acid and any non-natural amino acid; see  specification as filed for detail ed description of substitutions, R-groups  and preferred embodiments
  MOD_RES (11)..(11): Any L- or D-natural amino acid and any non-natural amino acid; see  specification as filed for detail ed description of substitutions, R-groups  and preferred embodiments
  MOD_RES (14)..(14): Any L- or D-natural amino acid and any non-natural amino acid; see  specification as filed for detail ed description of substitutions, R-groups  and preferred embodiments
  MOD_RES (15)..(18): Any L- or D-natural or non-natural amino acid, and this range may  encompass 1 or 4 residues; see spe cification as filed for detailed  description of substitutions, R-groups and preferred embodi
  c-term may be amidated
VXLSRTVRXTXISXXXXXLNPESKAIKNLLK

SEQ ID NO: 254 - protein, 31 aa, Artificial Sequence
  Description of Artificial Sequence: Synthetic peptide
  MOD_RES (3)..(3): Any L- or D-natural amino acid and any non-natural amino acid; see  specification as filed for detail ed description of substitutions, R-groups  and preferred embodiments
  MOD_RES (9)..(9): Any L- or D-natural amino acid and any non-natural amino acid; see  specification as filed for detail ed description of substitutions, R-groups  and preferred embodiments
  MOD_RES (11)..(11): Any L- or D-natural amino acid and any non-natural amino acid; see  specification as filed for detail ed description of substitutions, R-groups  and preferred embodiments
  MOD_RES (14)..(14): Any L- or D-natural amino acid and any non-natural amino acid; see  specification as filed for detail ed description of substitutions, R-groups  and preferred embodiments
  MOD_RES (15)..(18): Any L- or D-natural or non-natural amino acid, and this range may  encompass 1 or 4 residues; see spe cification as filed for detailed  description of substitutions, R-groups and preferred embodi
  c-term may be amidated
VPXSRTVRXTXISXXXXXLNPESKAIKNLLK

SEQ ID NO: 255 - protein, 31 aa, Artificial Sequence
  Description of Artificial Sequence: Synthetic peptide
  MOD_RES (4)..(4): Any L- or D-natural amino acid and any non-natural amino acid; see  specification as filed for detail ed description of substitutions, R-groups  and preferred embodiments
  MOD_RES (9)..(9): Any L- or D-natural amino acid and any non-natural amino acid; see  specification as filed for detail ed description of substitutions, R-groups  and preferred embodiments
  MOD_RES (11)..(11): Any L- or D-natural amino acid and any non-natural amino acid; see  specification as filed for detail ed description of substitutions, R-groups  and preferred embodiments
  MOD_RES (14)..(14): Any L- or D-natural amino acid and any non-natural amino acid; see  specification as filed for detail ed description of substitutions, R-groups  and preferred embodiments
  MOD_RES (15)..(18): Any L- or D-natural or non-natural amino acid, and this range may  encompass 1 or 4 residues; see spe cification as filed for detailed  description of substitutions, R-groups and preferred embodi
  c-term may be amidated
VPLXRTVRXTXISXXXXXLNPESKAIKNLLK

SEQ ID NO: 256 - protein, 31 aa, Artificial Sequence
  Description of Artificial Sequence: Synthetic peptide
  MOD_RES (5)..(5): Any L- or D-natural amino acid and any non-natural amino acid; see  specification as filed for detail ed description of substitutions, R-groups  and preferred embodiments
  MOD_RES (9)..(9): Any L- or D-natural amino acid and any non-natural amino acid; see  specification as filed for detail ed description of substitutions, R-groups  and preferred embodiments
  MOD_RES (11)..(11): Any L- or D-natural amino acid and any non-natural amino acid; see  specification as filed for detail ed description of substitutions, R-groups  and preferred embodiments
  MOD_RES (14)..(14): Any L- or D-natural amino acid and any non-natural amino acid; see  specification as filed for detail ed description of substitutions, R-groups  and preferred embodiments
  MOD_RES (15)..(18): Any L- or D-natural or non-natural amino acid, and this range may  encompass 1 or 4 residues; see spe cification as filed for detailed  description of substitutions, R-groups and preferred embodi
  c-term may be amidated
VPLSXTVRXTXISXXXXXLNPESKAIKNLLK

SEQ ID NO: 257 - protein, 31 aa, Artificial Sequence
  Description of Artificial Sequence: Synthetic peptide
  MOD_RES (6)..(6): Any L- or D-natural amino acid and any non-natural amino acid; see  specification as filed for detail ed description of substitutions, R-groups  and preferred embodiments
  MOD_RES (9)..(9): Any L- or D-natural amino acid and any non-natural amino acid; see  specification as filed for detail ed description of substitutions, R-groups  and preferred embodiments
  MOD_RES (11)..(11): Any L- or D-natural amino acid and any non-natural amino acid; see  specification as filed for detail ed description of substitutions, R-groups  and preferred embodiments
  MOD_RES (14)..(14): Any L- or D-natural amino acid and any non-natural amino acid; see  specification as filed for detail ed description of substitutions, R-groups  and preferred embodiments
  MOD_RES (15)..(18): Any L- or D-natural or non-natural amino acid, and this range may  encompass 1 or 4 residues; see spe cification as filed for detailed  description of substitutions, R-groups and preferred embodi
  c-term may be amidated
VPLSRXVRXTXISXXXXXLNPESKAIKNLLK

SEQ ID NO: 258 - protein, 31 aa, Artificial Sequence
  Description of Artificial Sequence: Synthetic peptide
  MOD_RES (7)..(7): Any L- or D-natural amino acid and any non-natural amino acid; see  specification as filed for detail ed description of substitutions, R-groups  and preferred embodiments
  MOD_RES (9)..(9): Any L- or D-natural amino acid and any non-natural amino acid; see  specification as filed for detail ed description of substitutions, R-groups  and preferred embodiments
  MOD_RES (11)..(11): Any L- or D-natural amino acid and any non-natural amino acid; see  specification as filed for detail ed description of substitutions, R-groups  and preferred embodiments
  MOD_RES (14)..(14): Any L- or D-natural amino acid and any non-natural amino acid; see  specification as filed for detail ed description of substitutions, R-groups  and preferred embodiments
  MOD_RES (15)..(18): Any L- or D-natural or non-natural amino acid, and this range may  encompass 1 or 4 residues; see spe cification as filed for detailed  description of substitutions, R-groups and preferred embodi
  c-term may be amidated
VPLSRTXRXTXISXXXXXLNPESKAIKNLLK

SEQ ID NO: 259 - protein, 31 aa, Artificial Sequence
  Description of Artificial Sequence: Synthetic peptide
  MOD_RES (8)..(9): Any L- or D-natural amino acid and any non-natural amino acid; see  specification as filed for detail ed description of substitutions, R-groups  and preferred embodiments
  MOD_RES (11)..(11): Any L- or D-natural amino acid and any non-natural amino acid; see  specification as filed for detail ed description of substitutions, R-groups  and preferred embodiments
  MOD_RES (14)..(14): Any L- or D-natural amino acid and any non-natural amino acid; see  specification as filed for detail ed description of substitutions, R-groups  and preferred embodiments
  MOD_RES (15)..(18): Any L- or D-natural or non-natural amino acid, and this range may  encompass 1 or 4 residues; see spe cification as filed for detailed  description of substitutions, R-groups and preferred embodi
  c-term may be amidated
VPLSRTVXXTXISXXXXXLNPESKAIKNLLK

SEQ ID NO: 260 - protein, 31 aa, Artificial Sequence
  Description of Artificial Sequence: Synthetic peptide
  MOD_RES (15)..(18): Any L- or D-natural or non-natural amino acid, and this range may  encompass 1 or 4 residues; see spe cification as filed for detailed  description of substitutions, R-groups and preferred embodi
  c-term may be amidated
VPLSRTVRCTCISIXXXXKAIKNLLKAVSKE

SEQ ID NO: 261 - protein, 31 aa, Artificial Sequence
  Description of Artificial Sequence: Synthetic peptide
  MOD_RES (1)..(1): Any L- or D-natural amino acid and any non-natural amino acid; see  specification as filed for detail ed description of substitutions, R-groups  and preferred embodiments
  MOD_RES (9)..(9): Any L- or D-natural amino acid and any non-natural amino acid; see  specification as filed for detail ed description of substitutions, R-groups  and preferred embodiments
  MOD_RES (11)..(11): Any L- or D-natural amino acid and any non-natural amino acid; see  specification as filed for detail ed description of substitutions, R-groups  and preferred embodiments
  MOD_RES (15)..(18): Any L- or D-natural or non-natural amino acid, and this range may  encompass 1 or 4 residues; see spe cification as filed for detailed  description of substitutions, R-groups and preferred embodi
  c-term may be amidated
XPLSRTVRXTXISIXXXXKAIKNLLKAVSKE

SEQ ID NO: 262 - protein, 31 aa, Artificial Sequence
  Description of Artificial Sequence: Synthetic peptide
  MOD_RES (2)..(2): Any L- or D-natural amino acid and any non-natural amino acid; see  specification as filed for detail ed description of substitutions, R-groups  and preferred embodiments
  MOD_RES (9)..(9): Any L- or D-natural amino acid and any non-natural amino acid; see  specification as filed for detail ed description of substitutions, R-groups  and preferred embodiments
  MOD_RES (11)..(11): Any L- or D-natural amino acid and any non-natural amino acid; see  specification as filed for detail ed description of substitutions, R-groups  and preferred embodiments
  MOD_RES (15)..(18): Any L- or D-natural or non-natural amino acid, and this range may  encompass 1 or 4 residues; see spe cification as filed for detailed  description of substitutions, R-groups and preferred embodi
  c-term may be amidated
VXLSRTVRXTXISIXXXXKAIKNLLKAVSKE

SEQ ID NO: 263 - protein, 31 aa, Artificial Sequence
  Description of Artificial Sequence: Synthetic peptide
  MOD_RES (3)..(3): Any L- or D-natural amino acid and any non-natural amino acid; see  specification as filed for detail ed description of substitutions, R-groups  and preferred embodiments
  MOD_RES (9)..(9): Any L- or D-natural amino acid and any non-natural amino acid; see  specification as filed for detail ed description of substitutions, R-groups  and preferred embodiments
  MOD_RES (11)..(11): Any L- or D-natural amino acid and any non-natural amino acid; see  specification as filed for detail ed description of substitutions, R-groups  and preferred embodiments
  MOD_RES (15)..(18): Any L- or D-natural or non-natural amino acid, and this range may  encompass 1 or 4 residues; see spe cification as filed for detailed  description of substitutions, R-groups and preferred embodi
  c-term may be amidated
VPXSRTVRXTXISIXXXXKAIKNLLKAVSKE

SEQ ID NO: 264 - protein, 31 aa, Artificial Sequence
  Description of Artificial Sequence: Synthetic peptide
  MOD_RES (4)..(4): Any L- or D-natural amino acid and any non-natural amino acid; see  specification as filed for detail ed description of substitutions, R-groups  and preferred embodiments
  MOD_RES (9)..(9): Any L- or D-natural amino acid and any non-natural amino acid; see  specification as filed for detail ed description of substitutions, R-groups  and preferred embodiments
  MOD_RES (11)..(11): Any L- or D-natural amino acid and any non-natural amino acid; see  specification as filed for detail ed description of substitutions, R-groups  and preferred embodiments
  MOD_RES (15)..(18): Any L- or D-natural or non-natural amino acid, and this range may  encompass 1 or 4 residues; see spe cification as filed for detailed  description of substitutions, R-groups and preferred embodi
  c-term may be amidated
VPLXRTVRXTXISIXXXXKAIKNLLKAVSKE

SEQ ID NO: 265 - protein, 31 aa, Artificial Sequence
  Description of Artificial Sequence: Synthetic peptide
  MOD_RES (5)..(5): Any L- or D-natural amino acid and any non-natural amino acid; see  specification as filed for detail ed description of substitutions, R-groups  and preferred embodiments
  MOD_RES (9)..(9): Any L- or D-natural amino acid and any non-natural amino acid; see  specification as filed for detail ed description of substitutions, R-groups  and preferred embodiments
  MOD_RES (11)..(11): Any L- or D-natural amino acid and any non-natural amino acid; see  specification as filed for detail ed description of substitutions, R-groups  and preferred embodiments
  MOD_RES (15)..(18): Any L- or D-natural or non-natural amino acid, and this range may  encompass 1 or 4 residues; see spe cification as filed for detailed  description of substitutions, R-groups and preferred embodi
  c-term may be amidated
VPLSXTVRXTXISIXXXXKAIKNLLKAVSKE

SEQ ID NO: 266 - protein, 31 aa, Artificial Sequence
  Description of Artificial Sequence: Synthetic peptide
  MOD_RES (6)..(6): Any L- or D-natural amino acid and any non-natural amino acid; see  specification as filed for detail ed description of substitutions, R-groups  and preferred embodiments
  MOD_RES (9)..(9): Any L- or D-natural amino acid and any non-natural amino acid; see  specification as filed for detail ed description of substitutions, R-groups  and preferred embodiments
  MOD_RES (11)..(11): Any L- or D-natural amino acid and any non-natural amino acid; see  specification as filed for detail ed description of substitutions, R-groups  and preferred embodiments
  MOD_RES (15)..(18): Any L- or D-natural or non-natural amino acid, and this range may  encompass 1 or 4 residues; see spe cification as filed for detailed  description of substitutions, R-groups and preferred embodi
  c-term may be amidated
VPLSRXVRXTXISIXXXXKAIKNLLKAVSKE

SEQ ID NO: 267 - protein, 31 aa, Artificial Sequence
  Description of Artificial Sequence: Synthetic peptide
  MOD_RES (7)..(7): Any L- or D-natural amino acid and any non-natural amino acid; see  specification as filed for detail ed description of substitutions, R-groups  and preferred embodiments
  MOD_RES (9)..(9): Any L- or D-natural amino acid and any non-natural amino acid; see  specification as filed for detail ed description of substitutions, R-groups  and preferred embodiments
  MOD_RES (11)..(11): Any L- or D-natural amino acid and any non-natural amino acid; see  specification as filed for detail ed description of substitutions, R-groups  and preferred embodiments
  MOD_RES (15)..(18): Any L- or D-natural or non-natural amino acid, and this range may  encompass 1 or 4 residues; see spe cification as filed for detailed  description of substitutions, R-groups and preferred embodi
  c-term may be amidated
VPLSRTXRXTXISIXXXXKAIKNLLKAVSKE

SEQ ID NO: 268 - protein, 31 aa, Artificial Sequence
  Description of Artificial Sequence: Synthetic peptide
  MOD_RES (8)..(9): Any L- or D-natural amino acid and any non-natural amino acid; see  specification as filed for detail ed description of substitutions, R-groups  and preferred embodiments
  MOD_RES (11)..(11): Any L- or D-natural amino acid and any non-natural amino acid; see  specification as filed for detail ed description of substitutions, R-groups  and preferred embodiments
  MOD_RES (15)..(18): Any L- or D-natural or non-natural amino acid, and this range may  encompass 1 or 4 residues; see spe cification as filed for detailed  description of substitutions, R-groups and preferred embodi
  c-term may be amidated
VPLSRTVXXTXISIXXXXKAIKNLLKAVSKE

SEQ ID NO: 269 - protein, 31 aa, Artificial Sequence
  Description of Artificial Sequence: Synthetic peptide
  MOD_RES (12)..(12): Any L- or D-natural amino acid and any non-natural amino acid; see  specification as filed for detail ed description of substitutions, R-groups  and preferred embodiments
  MOD_RES (15)..(18): Any L- or D-natural or non-natural amino acid, and this range may  encompass 1 or 4 residues; see spe cification as filed for detailed  description of substitutions, R-groups and preferred embodi
  c-term may be amidated
VPLSRTVRCTCXSIXXXXKAIKNLLKAVSKE

SEQ ID NO: 270 - protein, 31 aa, Artificial Sequence
  Description of Artificial Sequence: Synthetic peptide
  MOD_RES (1)..(1): Any L- or D-natural amino acid and any non-natural amino acid; see  specification as filed for detail ed description of substitutions, R-groups  and preferred embodiments
  MOD_RES (9)..(9): Any L- or D-natural amino acid and any non-natural amino acid; see  specification as filed for detail ed description of substitutions, R-groups  and preferred embodiments
  MOD_RES (11)..(12): Any L- or D-natural amino acid and any non-natural amino acid; see  specification as filed for detail ed description of substitutions, R-groups  and preferred embodiments
  MOD_RES (15)..(18): Any L- or D-natural or non-natural amino acid, and this range may  encompass 1 or 4 residues; see spe cification as filed for detailed  description of substitutions, R-groups and preferred embodi
  c-term may be amidated
XPLSRTVRXTXXSIXXXXKAIKNLLKAVSKE

SEQ ID NO: 271 - protein, 31 aa, Artificial Sequence
  Description of Artificial Sequence: Synthetic peptide
  MOD_RES (2)..(2): Any L- or D-natural amino acid and any non-natural amino acid; see  specification as filed for detail ed description of substitutions, R-groups  and preferred embodiments
  MOD_RES (9)..(9): Any L- or D-natural amino acid and any non-natural amino acid; see  specification as filed for detail ed description of substitutions, R-groups  and preferred embodiments
  MOD_RES (11)..(12): Any L- or D-natural amino acid and any non-natural amino acid; see  specification as filed for detail ed description of substitutions, R-groups  and preferred embodiments
  MOD_RES (15)..(18): Any L- or D-natural or non-natural amino acid, and this range may  encompass 1 or 4 residues; see spe cification as filed for detailed  description of substitutions, R-groups and preferred embodi
  c-term may be amidated
VXLSRTVRXTXXSIXXXXKAIKNLLKAVSKE

SEQ ID NO: 272 - protein, 31 aa, Artificial Sequence
  Description of Artificial Sequence: Synthetic peptide
  MOD_RES (3)..(3): Any L- or D-natural amino acid and any non-natural amino acid; see  specification as filed for detail ed description of substitutions, R-groups  and preferred embodiments
  MOD_RES (9)..(9): Any L- or D-natural amino acid and any non-natural amino acid; see  specification as filed for detail ed description of substitutions, R-groups  and preferred embodiments
  MOD_RES (11)..(12): Any L- or D-natural amino acid and any non-natural amino acid; see  specification as filed for detail ed description of substitutions, R-groups  and preferred embodiments
  MOD_RES (15)..(18): Any L- or D-natural or non-natural amino acid, and this range may  encompass 1 or 4 residues; see spe cification as filed for detailed  description of substitutions, R-groups and preferred embodi
  c-term may be amidated
VPXSRTVRXTXXSIXXXXKAIKNLLKAVSKE

SEQ ID NO: 273 - protein, 31 aa, Artificial Sequence
  Description of Artificial Sequence: Synthetic peptide
  MOD_RES (4)..(4): Any L- or D-natural amino acid and any non-natural amino acid; see  specification as filed for detail ed description of substitutions, R-groups  and preferred embodiments
  MOD_RES (9)..(9): Any L- or D-natural amino acid and any non-natural amino acid; see  specification as filed for detail ed description of substitutions, R-groups  and preferred embodiments
  MOD_RES (11)..(12): Any L- or D-natural amino acid and any non-natural amino acid; see  specification as filed for detail ed description of substitutions, R-groups  and preferred embodiments
  MOD_RES (15)..(18): Any L- or D-natural or non-natural amino acid, and this range may  encompass 1 or 4 residues; see spe cification as filed for detailed  description of substitutions, R-groups and preferred embodi
  c-term may be amidated
VPLXRTVRXTXXSIXXXXKAIKNLLKAVSKE

SEQ ID NO: 274 - protein, 31 aa, Artificial Sequence
  Description of Artificial Sequence: Synthetic peptide
  MOD_RES (5)..(5): Any L- or D-natural amino acid and any non-natural amino acid; see  specification as filed for detail ed description of substitutions, R-groups  and preferred embodiments
  MOD_RES (9)..(9): Any L- or D-natural amino acid and any non-natural amino acid; see  specification as filed for detail ed description of substitutions, R-groups  and preferred embodiments
  MOD_RES (11)..(12): Any L- or D-natural amino acid and any non-natural amino acid; see  specification as filed for detail ed description of substitutions, R-groups  and preferred embodiments
  MOD_RES (15)..(18): Any L- or D-natural or non-natural amino acid, and this range may  encompass 1 or 4 residues; see spe cification as filed for detailed  description of substitutions, R-groups and preferred embodi
  c-term may be amidated
VPLSXTVRXTXXSIXXXXKAIKNLLKAVSKE

SEQ ID NO: 275 - protein, 31 aa, Artificial Sequence
  Description of Artificial Sequence: Synthetic peptide
  MOD_RES (6)..(6): Any L- or D-natural amino acid and any non-natural amino acid; see  specification as filed for detail ed description of substitutions, R-groups  and preferred embodiments
  MOD_RES (9)..(9): Any L- or D-natural amino acid and any non-natural amino acid; see  specification as filed for detail ed description of substitutions, R-groups  and preferred embodiments
  MOD_RES (11)..(12): Any L- or D-natural amino acid and any non-natural amino acid; see  specification as filed for detail ed description of substitutions, R-groups  and preferred embodiments
  MOD_RES (15)..(18): Any L- or D-natural or non-natural amino acid, and this range may  encompass 1 or 4 residues; see spe cification as filed for detailed  description of substitutions, R-groups and preferred embodi
  c-term may be amidated
VPLSRXVRXTXXSIXXXXKAIKNLLKAVSKE

SEQ ID NO: 276 - protein, 31 aa, Artificial Sequence
  Description of Artificial Sequence: Synthetic peptide
  MOD_RES (7)..(7): Any L- or D-natural amino acid and any non-natural amino acid; see  specification as filed for detail ed description of substitutions, R-groups  and preferred embodiments
  MOD_RES (9)..(9): Any L- or D-natural amino acid and any non-natural amino acid; see  specification as filed for detail ed description of substitutions, R-groups  and preferred embodiments
  MOD_RES (11)..(12): Any L- or D-natural amino acid and any non-natural amino acid; see  specification as filed for detail ed description of substitutions, R-groups  and preferred embodiments
  MOD_RES (15)..(18): Any L- or D-natural or non-natural amino acid, and this range may  encompass 1 or 4 residues; see spe cification as filed for detailed  description of substitutions, R-groups and preferred embodi
  c-term may be amidated
VPLSRTXRXTXXSIXXXXKAIKNLLKAVSKE

SEQ ID NO: 277 - protein, 31 aa, Artificial Sequence
  Description of Artificial Sequence: Synthetic peptide
  MOD_RES (8)..(9): Any L- or D-natural amino acid and any non-natural amino acid; see  specification as filed for detail ed description of substitutions, R-groups  and preferred embodiments
  MOD_RES (11)..(12): Any L- or D-natural amino acid and any non-natural amino acid; see  specification as filed for detail ed description of substitutions, R-groups  and preferred embodiments
  MOD_RES (15)..(18): Any L- or D-natural or non-natural amino acid, and this range may  encompass 1 or 4 residues; see spe cification as filed for detailed  description of substitutions, R-groups and preferred embodi
  c-term may be amidated
VPLSRTVXXTXXSIXXXXKAIKNLLKAVSKE

SEQ ID NO: 278 - protein, 31 aa, Artificial Sequence
  Description of Artificial Sequence: Synthetic peptide
  MOD_RES (13)..(13): Any L- or D-natural amino acid and any non-natural amino acid; see  specification as filed for detail ed description of substitutions, R-groups  and preferred embodiments
  MOD_RES (15)..(18): Any L- or D-natural or non-natural amino acid, and this range may  encompass 1 or 4 residues; see spe cification as filed for detailed  description of substitutions, R-groups and preferred embodi
  c-term may be amidated
VPLSRTVRCTCIXIXXXXKAIKNLLKAVSKE

SEQ ID NO: 279 - protein, 31 aa, Artificial Sequence
  Description of Artificial Sequence: Synthetic peptide
  MOD_RES (1)..(1): Any L- or D-natural amino acid and any non-natural amino acid; see  specification as filed for detail ed description of substitutions, R-groups  and preferred embodiments
  MOD_RES (9)..(9): Any L- or D-natural amino acid and any non-natural amino acid; see  specification as filed for detail ed description of substitutions, R-groups  and preferred embodiments
  MOD_RES (11)..(11): Any L- or D-natural amino acid and any non-natural amino acid; see  specification as filed for detail ed description of substitutions, R-groups  and preferred embodiments
  MOD_RES (13)..(13): Any L- or D-natural amino acid and any non-natural amino acid; see  specification as filed for detail ed description of substitutions, R-groups  and preferred embodiments
  MOD_RES (15)..(18): Any L- or D-natural or non-natural amino acid, and this range may  encompass 1 or 4 residues; see spe cification as filed for detailed  description of substitutions, R-groups and preferred embodi
  c-term may be amidated
XPLSRTVRXTXIXIXXXXKAIKNLLKAVSKE

SEQ ID NO: 280 - protein, 31 aa, Artificial Sequence
  Description of Artificial Sequence: Synthetic peptide
  MOD_RES (2)..(2): Any L- or D-natural amino acid and any non-natural amino acid; see  specification as filed for detail ed description of substitutions, R-groups  and preferred embodiments
  MOD_RES (9)..(9): Any L- or D-natural amino acid and any non-natural amino acid; see  specification as filed for detail ed description of substitutions, R-groups  and preferred embodiments
  MOD_RES (11)..(11): Any L- or D-natural amino acid and any non-natural amino acid; see  specification as filed for detail ed description of substitutions, R-groups  and preferred embodiments
  MOD_RES (13)..(13): Any L- or D-natural amino acid and any non-natural amino acid; see  specification as filed for detail ed description of substitutions, R-groups  and preferred embodiments
  MOD_RES (15)..(18): Any L- or D-natural or non-natural amino acid, and this range may  encompass 1 or 4 residues; see spe cification as filed for detailed  description of substitutions, R-groups and preferred embodi
  c-term may be amidated
VXLSRTVRXTXIXIXXXXKAIKNLLKAVSKE

SEQ ID NO: 281 - protein, 31 aa, Artificial Sequence
  Description of Artificial Sequence: Synthetic peptide
  MOD_RES (3)..(3): Any L- or D-natural amino acid and any non-natural amino acid; see  specification as filed for detail ed description of substitutions, R-groups  and preferred embodiments
  MOD_RES (9)..(9): Any L- or D-natural amino acid and any non-natural amino acid; see  specification as filed for detail ed description of substitutions, R-groups  and preferred embodiments
  MOD_RES (11)..(11): Any L- or D-natural amino acid and any non-natural amino acid; see  specification as filed for detail ed description of substitutions, R-groups  and preferred embodiments
  MOD_RES (13)..(13): Any L- or D-natural amino acid and any non-natural amino acid; see  specification as filed for detail ed description of substitutions, R-groups  and preferred embodiments
  MOD_RES (15)..(18): Any L- or D-natural or non-natural amino acid, and this range may  encompass 1 or 4 residues; see spe cification as filed for detailed  description of substitutions, R-groups and preferred embodi
  c-term may be amidated
VPXSRTVRXTXIXIXXXXKAIKNLLKAVSKE

SEQ ID NO: 282 - protein, 31 aa, Artificial Sequence
  Description of Artificial Sequence: Synthetic peptide
  MOD_RES (4)..(4): Any L- or D-natural amino acid and any non-natural amino acid; see  specification as filed for detail ed description of substitutions, R-groups  and preferred embodiments
  MOD_RES (9)..(9): Any L- or D-natural amino acid and any non-natural amino acid; see  specification as filed for detail ed description of substitutions, R-groups  and preferred embodiments
  MOD_RES (11)..(11): Any L- or D-natural amino acid and any non-natural amino acid; see  specification as filed for detail ed description of substitutions, R-groups  and preferred embodiments
  MOD_RES (13)..(13): Any L- or D-natural amino acid and any non-natural amino acid; see  specification as filed for detail ed description of substitutions, R-groups  and preferred embodiments
  MOD_RES (15)..(18): Any L- or D-natural or non-natural amino acid, and this range may  encompass 1 or 4 residues; see spe cification as filed for detailed  description of substitutions, R-groups and preferred embodi
  c-term may be amidated
VPLXRTVRXTXIXIXXXXKAIKNLLKAVSKE

SEQ ID NO: 283 - protein, 31 aa, Artificial Sequence
  Description of Artificial Sequence: Synthetic peptide
  MOD_RES (5)..(5): Any L- or D-natural amino acid and any non-natural amino acid; see  specification as filed for detail ed description of substitutions, R-groups  and preferred embodiments
  MOD_RES (9)..(9): Any L- or D-natural amino acid and any non-natural amino acid; see  specification as filed for detail ed description of substitutions, R-groups  and preferred embodiments
  MOD_RES (11)..(11): Any L- or D-natural amino acid and any non-natural amino acid; see  specification as filed for detail ed description of substitutions, R-groups  and preferred embodiments
  MOD_RES (13)..(13): Any L- or D-natural amino acid and any non-natural amino acid; see  specification as filed for detail ed description of substitutions, R-groups  and preferred embodiments
  MOD_RES (15)..(18): Any L- or D-natural or non-natural amino acid, and this range may  encompass 1 or 4 residues; see spe cification as filed for detailed  description of substitutions, R-groups and preferred embodi
  c-term may be amidated
VPLSXTVRXTXIXIXXXXKAIKNLLKAVSKE

SEQ ID NO: 284 - protein, 31 aa, Artificial Sequence
  Description of Artificial Sequence: Synthetic peptide
  MOD_RES (6)..(6): Any L- or D-natural amino acid and any non-natural amino acid; see  specification as filed for detail ed description of substitutions, R-groups  and preferred embodiments
  MOD_RES (9)..(9): Any L- or D-natural amino acid and any non-natural amino acid; see  specification as filed for detail ed description of substitutions, R-groups  and preferred embodiments
  MOD_RES (11)..(11): Any L- or D-natural amino acid and any non-natural amino acid; see  specification as filed for detail ed description of substitutions, R-groups  and preferred embodiments
  MOD_RES (13)..(13): Any L- or D-natural amino acid and any non-natural amino acid; see  specification as filed for detail ed description of substitutions, R-groups  and preferred embodiments
  MOD_RES (15)..(18): Any L- or D-natural or non-natural amino acid, and this range may  encompass 1 or 4 residues; see spe cification as filed for detailed  description of substitutions, R-groups and preferred embodi
  c-term may be amidated
VPLSRXVRXTXIXIXXXXKAIKNLLKAVSKE

SEQ ID NO: 285 - protein, 31 aa, Artificial Sequence
  Description of Artificial Sequence: Synthetic peptide
  MOD_RES (7)..(7): Any L- or D-natural amino acid and any non-natural amino acid; see  specification as filed for detail ed description of substitutions, R-groups  and preferred embodiments
  MOD_RES (9)..(9): Any L- or D-natural amino acid and any non-natural amino acid; see  specification as filed for detail ed description of substitutions, R-groups  and preferred embodiments
  MOD_RES (11)..(11): Any L- or D-natural amino acid and any non-natural amino acid; see  specification as filed for detail ed description of substitutions, R-groups  and preferred embodiments
  MOD_RES (13)..(13): Any L- or D-natural amino acid and any non-natural amino acid; see  specification as filed for detail ed description of substitutions, R-groups  and preferred embodiments
  MOD_RES (15)..(18): Any L- or D-natural or non-natural amino acid, and this range may  encompass 1 or 4 residues; see spe cification as filed for detailed  description of substitutions, R-groups and preferred embodi
  c-term may be amidated
VPLSRTXRXTXIXIXXXXKAIKNLLKAVSKE

SEQ ID NO: 286 - protein, 31 aa, Artificial Sequence
  Description of Artificial Sequence: Synthetic peptide
  MOD_RES (8)..(9): Any L- or D-natural amino acid and any non-natural amino acid; see  specification as filed for detail ed description of substitutions, R-groups  and preferred embodiments
  MOD_RES (11)..(11): Any L- or D-natural amino acid and any non-natural amino acid; see  specification as filed for detail ed description of substitutions, R-groups  and preferred embodiments
  MOD_RES (13)..(13): Any L- or D-natural amino acid and any non-natural amino acid; see  specification as filed for detail ed description of substitutions, R-groups  and preferred embodiments
  MOD_RES (15)..(18): Any L- or D-natural or non-natural amino acid, and this range may  encompass 1 or 4 residues; see spe cification as filed for detailed  description of substitutions, R-groups and preferred embodi
  c-term may be amidated
VPLSRTVXXTXIXIXXXXKAIKNLLKAVSKE

SEQ ID NO: 287 - protein, 31 aa, Artificial Sequence
  Description of Artificial Sequence: Synthetic peptide
  MOD_RES (14)..(18): Any L- or D-natural or non-natural amino acid, and this range may  encompass 1 or 4 residues; see spe cification as filed for detailed  description of substitutions, R-groups and preferred embodi
  c-term may be amidated
VPLSRTVRCTCISXXXXXKAIKNLLKAVSKE

SEQ ID NO: 288 - protein, 31 aa, Artificial Sequence
  Description of Artificial Sequence: Synthetic peptide
  MOD_RES (1)..(1): Any L- or D-natural amino acid and any non-natural amino acid; see  specification as filed for detail ed description of substitutions, R-groups  and preferred embodiments
  MOD_RES (9)..(9): Any L- or D-natural amino acid and any non-natural amino acid; see  specification as filed for detail ed description of substitutions, R-groups  and preferred embodiments
  MOD_RES (11)..(11): Any L- or D-natural amino acid and any non-natural amino acid; see  specification as filed for detail ed description of substitutions, R-groups  and preferred embodiments
  MOD_RES (14)..(14): Any L- or D-natural amino acid and any non-natural amino acid; see  specification as filed for detail ed description of substitutions, R-groups  and preferred embodiments
  MOD_RES (15)..(18): Any L- or D-natural or non-natural amino acid, and this range may     encompass 1 or 4 residues; see specification as filed for detailed  description of substitutions, R-groups and preferred emb
  c-term may be amidated
XPLSRTVRXTXISXXXXXKAIKNLLKAVSKE

SEQ ID NO: 289 - protein, 31 aa, Artificial Sequence
  Description of Artificial Sequence: Synthetic peptide
  MOD_RES (2)..(2): Any L- or D-natural amino acid and any non-natural amino acid; see  specification as filed for detail ed description of substitutions, R-groups  and preferred embodiments
  MOD_RES (9)..(9): Any L- or D-natural amino acid and any non-natural amino acid; see  specification as filed for detail ed description of substitutions, R-groups  and preferred embodiments
  MOD_RES (11)..(11): Any L- or D-natural amino acid and any non-natural amino acid; see  specification as filed for detail ed description of substitutions, R-groups  and preferred embodiments
  MOD_RES (14)..(14): Any L- or D-natural amino acid and any non-natural amino acid; see  specification as filed for detail ed description of substitutions, R-groups  and preferred embodiments
  MOD_RES (15)..(18): Any L- or D-natural or non-natural amino acid, and this range may     encompass 1 or 4 residues; see specification as filed for detailed  description of substitutions, R-groups and preferred emb
  c-term may be amidated
VXLSRTVRXTXISXXXXXKAIKNLLKAVSKE

SEQ ID NO: 290 - protein, 31 aa, Artificial Sequence
  Description of Artificial Sequence: Synthetic peptide
  MOD_RES (3)..(3): Any L- or D-natural amino acid and any non-natural amino acid; see  specification as filed for detail ed description of substitutions, R-groups  and preferred embodiments
  MOD_RES (9)..(9): Any L- or D-natural amino acid and any non-natural amino acid; see  specification as filed for detail ed description of substitutions, R-groups  and preferred embodiments
  MOD_RES (11)..(11): Any L- or D-natural amino acid and any non-natural amino acid; see  specification as filed for detail ed description of substitutions, R-groups  and preferred embodiments
  MOD_RES (14)..(14): Any L- or D-natural amino acid and any non-natural amino acid; see  specification as filed for detail ed description of substitutions, R-groups  and preferred embodiments
  MOD_RES (15)..(18): Any L- or D-natural or non-natural amino acid, and this range may     encompass 1 or 4 residues; see specification as filed for detailed  description of substitutions, R-groups and preferred emb
  c-term may be amidated
VPXSRTVRXTXISXXXXXKAIKNLLKAVSKE

SEQ ID NO: 291 - protein, 31 aa, Artificial Sequence
  Description of Artificial Sequence: Synthetic peptide
  MOD_RES (4)..(4): Any L- or D-natural amino acid and any non-natural amino acid; see  specification as filed for detail ed description of substitutions, R-groups  and preferred embodiments
  MOD_RES (9)..(9): Any L- or D-natural amino acid and any non-natural amino acid; see  specification as filed for detail ed description of substitutions, R-groups  and preferred embodiments
  MOD_RES (11)..(11): Any L- or D-natural amino acid and any non-natural amino acid; see  specification as filed for detail ed description of substitutions, R-groups  and preferred embodiments
  MOD_RES (14)..(14): Any L- or D-natural amino acid and any non-natural amino acid; see  specification as filed for detail ed description of substitutions, R-groups  and preferred embodiments
  MOD_RES (15)..(18): Any L- or D-natural or non-natural amino acid, and this range may     encompass 1 or 4 residues; see specification as filed for detailed  description of substitutions, R-groups and preferred emb
  c-term may be amidated
VPLXRTVRXTXISXXXXXKAIKNLLKAVSKE

SEQ ID NO: 292 - protein, 31 aa, Artificial Sequence
  Description of Artificial Sequence: Synthetic peptide
  MOD_RES (5)..(5): Any L- or D-natural amino acid and any non-natural amino acid; see  specification as filed for detail ed description of substitutions, R-groups  and preferred embodiments
  MOD_RES (9)..(9): Any L- or D-natural amino acid and any non-natural amino acid; see  specification as filed for detail ed description of substitutions, R-groups  and preferred embodiments
  MOD_RES (11)..(11): Any L- or D-natural amino acid and any non-natural amino acid; see  specification as filed for detail ed description of substitutions, R-groups  and preferred embodiments
  MOD_RES (14)..(14): Any L- or D-natural amino acid and any non-natural amino acid; see  specification as filed for detail ed description of substitutions, R-groups  and preferred embodiments
  MOD_RES (15)..(18): Any L- or D-natural or non-natural amino acid, and this range may     encompass 1 or 4 residues; see specification as filed for detailed  description of substitutions, R-groups and preferred emb
  c-term may be amidated
VPLSXTVRXTXISXXXXXKAIKNLLKAVSKE

SEQ ID NO: 293 - protein, 31 aa, Artificial Sequence
  Description of Artificial Sequence: Synthetic peptide
  MOD_RES (6)..(6): Any L- or D-natural amino acid and any non-natural amino acid; see  specification as filed for detail ed description of substitutions, R-groups  and preferred embodiments
  MOD_RES (9)..(9): Any L- or D-natural amino acid and any non-natural amino acid; see  specification as filed for detail ed description of substitutions, R-groups  and preferred embodiments
  MOD_RES (11)..(11): Any L- or D-natural amino acid and any non-natural amino acid; see  specification as filed for detail ed description of substitutions, R-groups  and preferred embodiments
  MOD_RES (14)..(14): Any L- or D-natural amino acid and any non-natural amino acid; see  specification as filed for detail ed description of substitutions, R-groups  and preferred embodiments
  MOD_RES (15)..(18): Any L- or D-natural or non-natural amino acid, and this range may     encompass 1 or 4 residues; see specification as filed for detailed  description of substitutions, R-groups and preferred emb
  c-term may be amidated
VPLSRXVRXTXISXXXXXKAIKNLLKAVSKE

SEQ ID NO: 294 - protein, 31 aa, Artificial Sequence
  Description of Artificial Sequence: Synthetic peptide
  MOD_RES (7)..(7): Any L- or D-natural amino acid and any non-natural amino acid; see  specification as filed for detail ed description of substitutions, R-groups  and preferred embodiments
  MOD_RES (9)..(9): Any L- or D-natural amino acid and any non-natural amino acid; see  specification as filed for detail ed description of substitutions, R-groups  and preferred embodiments
  MOD_RES (11)..(11): Any L- or D-natural amino acid and any non-natural amino acid; see  specification as filed for detail ed description of substitutions, R-groups  and preferred embodiments
  MOD_RES (14)..(14): Any L- or D-natural amino acid and any non-natural amino acid; see  specification as filed for detail ed description of substitutions, R-groups  and preferred embodiments
  MOD_RES (15)..(18): Any L- or D-natural or non-natural amino acid, and this range may     encompass 1 or 4 residues; see specification as filed for detailed  description of substitutions, R-groups and preferred emb
  c-term may be amidated
VPLSRTXRXTXISXXXXXKAIKNLLKAVSKE

SEQ ID NO: 295 - protein, 31 aa, Artificial Sequence
  Description of Artificial Sequence: Synthetic peptide
  MOD_RES (8)..(9): Any L- or D-natural amino acid and any non-natural amino acid; see  specification as filed for detail ed description of substitutions, R-groups  and preferred embodiments
  MOD_RES (11)..(11): Any L- or D-natural amino acid and any non-natural amino acid; see  specification as filed for detail ed description of substitutions, R-groups  and preferred embodiments
  MOD_RES (14)..(14): Any L- or D-natural amino acid and any non-natural amino acid; see  specification as filed for detail ed description of substitutions, R-groups  and preferred embodiments
  MOD_RES (15)..(18): Any L- or D-natural or non-natural amino acid, and this range may     encompass 1 or 4 residues; see specification as filed for detailed  description of substitutions, R-groups and preferred emb
  c-term may be amidated
VPLSRTVXXTXISXXXXXKAIKNLLKAVSKE

SEQ ID NO: 296 - protein, 34 aa, Artificial Sequence
  Description of Artificial Sequence: Synthetic peptide
  MOD_RES (18)..(21): Any L- or D-natural or non-natural amino acid, and this range may     encompass 1 or 4 residues; see specification as filed for detailed  description of substitutions, R-groups and preferred emb
  c-term may be amidated
VPLSRTVRCTCISISNQXXXXLKAVSKEMSKRSP

SEQ ID NO: 297 - protein, 34 aa, Artificial Sequence
  Description of Artificial Sequence: Synthetic peptide
  MOD_RES (1)..(1): Any L- or D-natural amino acid and any non-natural amino acid; see  specification as filed for detail ed description of substitutions, R-groups  and preferred embodiments
  MOD_RES (9)..(9): Any L- or D-natural amino acid and any non-natural amino acid; see  specification as filed for detail ed description of substitutions, R-groups  and preferred embodiments
  MOD_RES (11)..(11): Any L- or D-natural amino acid and any non-natural amino acid; see  specification as filed for detail ed description of substitutions, R-groups  and preferred embodiments
  MOD_RES (18)..(21): Any L- or D-natural or non-natural amino acid, and this range may     encompass 1 or 4 residues; see specification as filed for detailed  description of substitutions, R-groups and preferred emb
  c-term may be amidated
XPLSRTVRXTXISISNQXXXXLKAVSKEMSKRSP

SEQ ID NO: 298 - protein, 34 aa, Artificial Sequence
  Description of Artificial Sequence: Synthetic peptide
  MOD_RES (2)..(2): Any L- or D-natural amino acid and any non-natural amino acid; see  specification as filed for detail ed description of substitutions, R-groups  and preferred embodiments
  MOD_RES (9)..(9): Any L- or D-natural amino acid and any non-natural amino acid; see  specification as filed for detail ed description of substitutions, R-groups  and preferred embodiments
  MOD_RES (11)..(11): Any L- or D-natural amino acid and any non-natural amino acid; see  specification as filed for detail ed description of substitutions, R-groups  and preferred embodiments
  MOD_RES (18)..(21): Any L- or D-natural or non-natural amino acid, and this range may     encompass 1 or 4 residues; see specification as filed for detailed  description of substitutions, R-groups and preferred emb
  c-term may be amidated
VXLSRTVRXTXISISNQXXXXLKAVSKEMSKRSP

SEQ ID NO: 299 - protein, 34 aa, Artificial Sequence
  Description of Artificial Sequence: Synthetic peptide
  MOD_RES (3)..(3): Any L- or D-natural amino acid and any non-natural amino acid; see  specification as filed for detail ed description of substitutions, R-groups  and preferred embodiments
  MOD_RES (9)..(9): Any L- or D-natural amino acid and any non-natural amino acid; see  specification as filed for detail ed description of substitutions, R-groups  and preferred embodiments
  MOD_RES (11)..(11): Any L- or D-natural amino acid and any non-natural amino acid; see  specification as filed for detail ed description of substitutions, R-groups  and preferred embodiments
  MOD_RES (18)..(21): Any L- or D-natural or non-natural amino acid, and this range may     encompass 1 or 4 residues; see specification as filed for detailed  description of substitutions, R-groups and preferred emb
  c-term may be amidated
VPXSRTVRXTXISISNQXXXXLKAVSKEMSKRSP

SEQ ID NO: 300 - protein, 34 aa, Artificial Sequence
  Description of Artificial Sequence: Synthetic peptide
  MOD_RES (4)..(4): Any L- or D-natural amino acid and any non-natural amino acid; see  specification as filed for detail ed description of substitutions, R-groups  and preferred embodiments
  MOD_RES (9)..(9): Any L- or D-natural amino acid and any non-natural amino acid; see  specification as filed for detail ed description of substitutions, R-groups  and preferred embodiments
  MOD_RES (11)..(11): Any L- or D-natural amino acid and any non-natural amino acid; see  specification as filed for detail ed description of substitutions, R-groups  and preferred embodiments
  MOD_RES (18)..(21): Any L- or D-natural or non-natural amino acid, and this range may     encompass 1 or 4 residues; see specification as filed for detailed  description of substitutions, R-groups and preferred emb
  c-term may be amidated
VPLXRTVRXTXISISNQXXXXLKAVSKEMSKRSP

SEQ ID NO: 301 - protein, 34 aa, Artificial Sequence
  Description of Artificial Sequence: Synthetic peptide
  MOD_RES (5)..(5): Any L- or D-natural amino acid and any non-natural amino acid; see  specification as filed for detail ed description of substitutions, R-groups  and preferred embodiments
  MOD_RES (9)..(9): Any L- or D-natural amino acid and any non-natural amino acid; see  specification as filed for detail ed description of substitutions, R-groups  and preferred embodiments
  MOD_RES (11)..(11): Any L- or D-natural amino acid and any non-natural amino acid; see  specification as filed for detail ed description of substitutions, R-groups  and preferred embodiments
  MOD_RES (18)..(21): Any L- or D-natural or non-natural amino acid, and this range may     encompass 1 or 4 residues; see specification as filed for detailed  description of substitutions, R-groups and preferred emb
  c-term may be amidated
VPLSXTVRXTXISISNQXXXXLKAVSKEMSKRSP

SEQ ID NO: 302 - protein, 34 aa, Artificial Sequence
  Description of Artificial Sequence: Synthetic peptide
  MOD_RES (6)..(6): Any L- or D-natural amino acid and any non-natural amino acid; see  specification as filed for detail ed description of substitutions, R-groups  and preferred embodiments
  MOD_RES (9)..(9): Any L- or D-natural amino acid and any non-natural amino acid; see  specification as filed for detail ed description of substitutions, R-groups  and preferred embodiments
  MOD_RES (11)..(11): Any L- or D-natural amino acid and any non-natural amino acid; see  specification as filed for detail ed description of substitutions, R-groups  and preferred embodiments
  MOD_RES (18)..(21): Any L- or D-natural or non-natural amino acid, and this range may     encompass 1 or 4 residues; see specification as filed for detailed  description of substitutions, R-groups and preferred emb
  c-term may be amidated
VPLSRXVRXTXISISNQXXXXLKAVSKEMSKRSP

SEQ ID NO: 303 - protein, 34 aa, Artificial Sequence
  Description of Artificial Sequence: Synthetic peptide
  MOD_RES (7)..(7): Any L- or D-natural amino acid and any non-natural amino acid; see  specification as filed for detail ed description of substitutions, R-groups  and preferred embodiments
  MOD_RES (9)..(9): Any L- or D-natural amino acid and any non-natural amino acid; see  specification as filed for detail ed description of substitutions, R-groups  and preferred embodiments
  MOD_RES (11)..(11): Any L- or D-natural amino acid and any non-natural amino acid; see  specification as filed for detail ed description of substitutions, R-groups  and preferred embodiments
  MOD_RES (18)..(21): Any L- or D-natural or non-natural amino acid, and this range may     encompass 1 or 4 residues; see specification as filed for detailed  description of substitutions, R-groups and preferred emb
  c-term may be amidated
VPLSRTXRXTXISISNQXXXXLKAVSKEMSKRSP

SEQ ID NO: 304 - protein, 34 aa, Artificial Sequence
  Description of Artificial Sequence: Synthetic peptide
  MOD_RES (8)..(9): Any L- or D-natural amino acid and any non-natural amino acid; see  specification as filed for detail ed description of substitutions, R-groups  and preferred embodiments
  MOD_RES (11)..(11): Any L- or D-natural amino acid and any non-natural amino acid; see  specification as filed for detail ed description of substitutions, R-groups  and preferred embodiments
  MOD_RES (18)..(21): Any L- or D-natural or non-natural amino acid, and this range may     encompass 1 or 4 residues; see specification as filed for detailed  description of substitutions, R-groups and preferred emb
  c-term may be amidated
VPLSRTVXXTXISISNQXXXXLKAVSKEMSKRSP

SEQ ID NO: 305 - protein, 34 aa, Artificial Sequence
  Description of Artificial Sequence: Synthetic peptide
  MOD_RES (12)..(12): Any L- or D-natural amino acid and any non-natural amino acid; see  specification as filed for detail ed description of substitutions, R-groups  and preferred embodiments
  MOD_RES (18)..(21): Any L- or D-natural or non-natural amino acid, and this range may     encompass 1 or 4 residues; see specification as filed for detailed  description of substitutions, R-groups and preferred emb
  c-term may be amidated
VPLSRTVRCTCXSISNQXXXXLKAVSKEMSKRSP

SEQ ID NO: 306 - protein, 34 aa, Artificial Sequence
  Description of Artificial Sequence: Synthetic peptide
  MOD_RES (1)..(1): Any L- or D-natural amino acid and any non-natural amino acid; see  specification as filed for detail ed description of substitutions, R-groups  and preferred embodiments
  MOD_RES (9)..(9): Any L- or D-natural amino acid and any non-natural amino acid; see  specification as filed for detail ed description of substitutions, R-groups  and preferred embodiments
  MOD_RES (11)..(12): Any L- or D-natural amino acid and any non-natural amino acid; see  specification as filed for detail ed description of substitutions, R-groups  and preferred embodiments
  MOD_RES (18)..(21): Any L- or D-natural or non-natural amino acid, and this range may     encompass 1 or 4 residues; see specification as filed for detailed  description of substitutions, R-groups and preferred emb
  c-term may be amidated
XPLSRTVRXTXXSISNQXXXXLKAVSKEMSKRSP

SEQ ID NO: 307 - protein, 34 aa, Artificial Sequence
  Description of Artificial Sequence: Synthetic peptide
  MOD_RES (2)..(2): Any L- or D-natural amino acid and any non-natural amino acid; see  specification as filed for detail ed description of substitutions, R-groups  and preferred embodiments
  MOD_RES (9)..(9): Any L- or D-natural amino acid and any non-natural amino acid; see  specification as filed for detail ed description of substitutions, R-groups  and preferred embodiments
  MOD_RES (11)..(12): Any L- or D-natural amino acid and any non-natural amino acid; see  specification as filed for detail ed description of substitutions, R-groups  and preferred embodiments
  MOD_RES (18)..(21): Any L- or D-natural or non-natural amino acid, and this range may     encompass 1 or 4 residues; see specification as filed for detailed  description of substitutions, R-groups and preferred emb
  c-term may be amidated
VXLSRTVRXTXXSISNQXXXXLKAVSKEMSKRSP

SEQ ID NO: 308 - protein, 34 aa, Artificial Sequence
  Description of Artificial Sequence: Synthetic peptide
  MOD_RES (3)..(3): Any L- or D-natural amino acid and any non-natural amino acid; see  specification as filed for detail ed description of substitutions, R-groups  and preferred embodiments
  MOD_RES (9)..(9): Any L- or D-natural amino acid and any non-natural amino acid; see  specification as filed for detail ed description of substitutions, R-groups  and preferred embodiments
  MOD_RES (11)..(12): Any L- or D-natural amino acid and any non-natural amino acid; see  specification as filed for detail ed description of substitutions, R-groups  and preferred embodiments
  MOD_RES (18)..(21): Any L- or D-natural or non-natural amino acid, and this range may     encompass 1 or 4 residues; see specification as filed for detailed  description of substitutions, R-groups and preferred emb
  c-term may be amidated
VPXSRTVRXTXXSISNQXXXXLKAVSKEMSKRSP

SEQ ID NO: 309 - protein, 34 aa, Artificial Sequence
  Description of Artificial Sequence: Synthetic peptide
  MOD_RES (4)..(4): Any L- or D-natural amino acid and any non-natural amino acid; see  specification as filed for detail ed description of substitutions, R-groups  and preferred embodiments
  MOD_RES (9)..(9): Any L- or D-natural amino acid and any non-natural amino acid; see  specification as filed for detail ed description of substitutions, R-groups  and preferred embodiments
  MOD_RES (11)..(12): Any L- or D-natural amino acid and any non-natural amino acid; see  specification as filed for detail ed description of substitutions, R-groups  and preferred embodiments
  MOD_RES (18)..(21): Any L- or D-natural or non-natural amino acid, and this range may     encompass 1 or 4 residues; see specification as filed for detailed  description of substitutions, R-groups and preferred emb
  c-term may be amidated
VPLXRTVRXTXXSISNQXXXXLKAVSKEMSKRSP

SEQ ID NO: 310 - protein, 34 aa, Artificial Sequence
  Description of Artificial Sequence: Synthetic peptide
  MOD_RES (5)..(5): Any L- or D-natural amino acid and any non-natural amino acid; see  specification as filed for detail ed description of substitutions, R-groups  and preferred embodiments
  MOD_RES (9)..(9): Any L- or D-natural amino acid and any non-natural amino acid; see  specification as filed for detail ed description of substitutions, R-groups  and preferred embodiments
  MOD_RES (11)..(12): Any L- or D-natural amino acid and any non-natural amino acid; see  specification as filed for detail ed description of substitutions, R-groups  and preferred embodiments
  MOD_RES (18)..(21): Any L- or D-natural or non-natural amino acid, and this range may     encompass 1 or 4 residues; see specification as filed for detailed  description of substitutions, R-groups and preferred emb
  c-term may be amidated
VPLSXTVRXTXXSISNQXXXXLKAVSKEMSKRSP

SEQ ID NO: 311 - protein, 34 aa, Artificial Sequence
  Description of Artificial Sequence: Synthetic peptide
  MOD_RES (6)..(6): Any L- or D-natural amino acid and any non-natural amino acid; see  specification as filed for detail ed description of substitutions, R-groups  and preferred embodiments
  MOD_RES (9)..(9): Any L- or D-natural amino acid and any non-natural amino acid; see  specification as filed for detail ed description of substitutions, R-groups  and preferred embodiments
  MOD_RES (11)..(12): Any L- or D-natural amino acid and any non-natural amino acid; see  specification as filed for detail ed description of substitutions, R-groups  and preferred embodiments
  MOD_RES (18)..(21): Any L- or D-natural or non-natural amino acid, and this range may     encompass 1 or 4 residues; see specification as filed for detailed  description of substitutions, R-groups and preferred emb
  c-term may be amidated
VPLSRXVRXTXXSISNQXXXXLKAVSKEMSKRSP

SEQ ID NO: 312 - protein, 34 aa, Artificial Sequence
  Description of Artificial Sequence: Synthetic peptide
  MOD_RES (7)..(7): Any L- or D-natural amino acid and any non-natural amino acid; see  specification as filed for detail ed description of substitutions, R-groups  and preferred embodiments
  MOD_RES (9)..(9): Any L- or D-natural amino acid and any non-natural amino acid; see  specification as filed for detail ed description of substitutions, R-groups  and preferred embodiments
  MOD_RES (11)..(12): Any L- or D-natural amino acid and any non-natural amino acid; see  specification as filed for detail ed description of substitutions, R-groups  and preferred embodiments
  MOD_RES (18)..(21): Any L- or D-natural or non-natural amino acid, and this range may     encompass 1 or 4 residues; see specification as filed for detailed  description of substitutions, R-groups and preferred emb
  c-term may be amidated
VPLSRTXRXTXXSISNQXXXXLKAVSKEMSKRSP

SEQ ID NO: 313 - protein, 34 aa, Artificial Sequence
  Description of Artificial Sequence: Synthetic peptide
  MOD_RES (8)..(9): Any L- or D-natural amino acid and any non-natural amino acid; see  specification as filed for detail ed description of substitutions, R-groups  and preferred embodiments
  MOD_RES (11)..(12): Any L- or D-natural amino acid and any non-natural amino acid; see  specification as filed for detail ed description of substitutions, R-groups  and preferred embodiments
  MOD_RES (18)..(21): Any L- or D-natural or non-natural amino acid, and this range may     encompass 1 or 4 residues; see specification as filed for detailed  description of substitutions, R-groups and preferred emb
  c-term may be amidated
VPLSRTVXXTXXSISNQXXXXLKAVSKEMSKRSP

SEQ ID NO: 314 - protein, 34 aa, Artificial Sequence
  Description of Artificial Sequence: Synthetic peptide
  MOD_RES (13)..(13): Any L- or D-natural amino acid and any non-natural amino acid; see  specification as filed for detail ed description of substitutions, R-groups  and preferred embodiments
  MOD_RES (18)..(21): Any L- or D-natural or non-natural amino acid, and this range may     encompass 1 or 4 residues; see specification as filed for detailed  description of substitutions, R-groups and preferred emb
  c-term may be amidated
VPLSRTVRCTCIXISNQXXXXLKAVSKEMSKRSP

SEQ ID NO: 315 - protein, 34 aa, Artificial Sequence
  Description of Artificial Sequence: Synthetic peptide
  MOD_RES (1)..(1): Any L- or D-natural amino acid and any non-natural amino acid; see  specification as filed for detail ed description of substitutions, R-groups  and preferred embodiments
  MOD_RES (9)..(9): Any L- or D-natural amino acid and any non-natural amino acid; see  specification as filed for detail ed description of substitutions, R-groups  and preferred embodiments
  MOD_RES (11)..(11): Any L- or D-natural amino acid and any non-natural amino acid; see  specification as filed for detail ed description of substitutions, R-groups  and preferred embodiments
  MOD_RES (13)..(13): Any L- or D-natural amino acid and any non-natural amino acid; see  specification as filed for detail ed description of substitutions, R-groups  and preferred embodiments
  MOD_RES (18)..(21): Any L- or D-natural or non-natural amino acid, and this range may     encompass 1 or 4 residues; see specification as filed for detailed  description of substitutions, R-groups and preferred emb
  c-term may be amidated
XPLSRTVRXTXIXISNQXXXXLKAVSKEMSKRSP

SEQ ID NO: 316 - protein, 34 aa, Artificial Sequence
  Description of Artificial Sequence: Synthetic peptide
  MOD_RES (2)..(2): Any L- or D-natural amino acid and any non-natural amino acid; see  specification as filed for detail ed description of substitutions, R-groups  and preferred embodiments
  MOD_RES (9)..(9): Any L- or D-natural amino acid and any non-natural amino acid; see  specification as filed for detail ed description of substitutions, R-groups  and preferred embodiments
  MOD_RES (11)..(11): Any L- or D-natural amino acid and any non-natural amino acid; see  specification as filed for detail ed description of substitutions, R-groups  and preferred embodiments
  MOD_RES (13)..(13): Any L- or D-natural amino acid and any non-natural amino acid; see  specification as filed for detail ed description of substitutions, R-groups  and preferred embodiments
  MOD_RES (18)..(21): Any L- or D-natural or non-natural amino acid, and this range may     encompass 1 or 4 residues; see specification as filed for detailed  description of substitutions, R-groups and preferred emb
  c-term may be amidated
VXLSRTVRXTXIXISNQXXXXLKAVSKEMSKRSP

SEQ ID NO: 317 - protein, 34 aa, Artificial Sequence
  Description of Artificial Sequence: Synthetic peptide
  MOD_RES (3)..(3): Any L- or D-natural amino acid and any non-natural amino acid; see  specification as filed for detail ed description of substitutions, R-groups  and preferred embodiments
  MOD_RES (9)..(9): Any L- or D-natural amino acid and any non-natural amino acid; see  specification as filed for detail ed description of substitutions, R-groups  and preferred embodiments
  MOD_RES (11)..(11): Any L- or D-natural amino acid and any non-natural amino acid; see  specification as filed for detail ed description of substitutions, R-groups  and preferred embodiments
  MOD_RES (13)..(13): Any L- or D-natural amino acid and any non-natural amino acid; see  specification as filed for detail ed description of substitutions, R-groups  and preferred embodiments
  MOD_RES (18)..(21): Any L- or D-natural or non-natural amino acid, and this range may     encompass 1 or 4 residues; see specification as filed for detailed  description of substitutions, R-groups and preferred emb
  c-term may be amidated
VPXSRTVRXTXIXISNQXXXXLKAVSKEMSKRSP

SEQ ID NO: 318 - protein, 34 aa, Artificial Sequence
  Description of Artificial Sequence: Synthetic peptide
  MOD_RES (4)..(4): Any L- or D-natural amino acid and any non-natural amino acid; see  specification as filed for detail ed description of substitutions, R-groups  and preferred embodiments
  MOD_RES (9)..(9): Any L- or D-natural amino acid and any non-natural amino acid; see  specification as filed for detail ed description of substitutions, R-groups  and preferred embodiments
  MOD_RES (11)..(11): Any L- or D-natural amino acid and any non-natural amino acid; see  specification as filed for detail ed description of substitutions, R-groups  and preferred embodiments
  MOD_RES (13)..(13): Any L- or D-natural amino acid and any non-natural amino acid; see  specification as filed for detail ed description of substitutions, R-groups  and preferred embodiments
  MOD_RES (18)..(21): Any L- or D-natural or non-natural amino acid, and this range may     encompass 1 or 4 residues; see specification as filed for detailed  description of substitutions, R-groups and preferred emb
  c-term may be amidated
VPLXRTVRXTXIXISNQXXXXLKAVSKEMSKRSP

SEQ ID NO: 319 - protein, 34 aa, Artificial Sequence
  Description of Artificial Sequence: Synthetic peptide
  MOD_RES (5)..(5): Any L- or D-natural amino acid and any non-natural amino acid; see  specification as filed for detail ed description of substitutions, R-groups  and preferred embodiments
  MOD_RES (9)..(9): Any L- or D-natural amino acid and any non-natural amino acid; see  specification as filed for detail ed description of substitutions, R-groups  and preferred embodiments
  MOD_RES (11)..(11): Any L- or D-natural amino acid and any non-natural amino acid; see  specification as filed for detail ed description of substitutions, R-groups  and preferred embodiments
  MOD_RES (13)..(13): Any L- or D-natural amino acid and any non-natural amino acid; see  specification as filed for detail ed description of substitutions, R-groups  and preferred embodiments
  MOD_RES (18)..(21): Any L- or D-natural or non-natural amino acid, and this range may     encompass 1 or 4 residues; see specification as filed for detailed  description of substitutions, R-groups and preferred emb
  c-term may be amidated
VPLSXTVRXTXIXISNQXXXXLKAVSKEMSKRSP

SEQ ID NO: 320 - protein, 34 aa, Artificial Sequence
  Description of Artificial Sequence: Synthetic peptide
  MOD_RES (6)..(6): Any L- or D-natural amino acid and any non-natural amino acid; see  specification as filed for detail ed description of substitutions, R-groups  and preferred embodiments
  MOD_RES (9)..(9): Any L- or D-natural amino acid and any non-natural amino acid; see  specification as filed for detail ed description of substitutions, R-groups  and preferred embodiments
  MOD_RES (11)..(11): Any L- or D-natural amino acid and any non-natural amino acid; see  specification as filed for detail ed description of substitutions, R-groups  and preferred embodiments
  MOD_RES (13)..(13): Any L- or D-natural amino acid and any non-natural amino acid; see  specification as filed for detail ed description of substitutions, R-groups  and preferred embodiments
  MOD_RES (18)..(21): Any L- or D-natural or non-natural amino acid, and this range may     encompass 1 or 4 residues; see specification as filed for detailed  description of substitutions, R-groups and preferred emb
  c-term may be amidated
VPLSRXVRXTXIXISNQXXXXLKAVSKEMSKRSP

SEQ ID NO: 321 - protein, 34 aa, Artificial Sequence
  Description of Artificial Sequence: Synthetic peptide
  MOD_RES (7)..(7): Any L- or D-natural amino acid and any non-natural amino acid; see  specification as filed for detail ed description of substitutions, R-groups  and preferred embodiments
  MOD_RES (9)..(9): Any L- or D-natural amino acid and any non-natural amino acid; see  specification as filed for detail ed description of substitutions, R-groups  and preferred embodiments
  MOD_RES (11)..(11): Any L- or D-natural amino acid and any non-natural amino acid; see  specification as filed for detail ed description of substitutions, R-groups  and preferred embodiments
  MOD_RES (13)..(13): Any L- or D-natural amino acid and any non-natural amino acid; see  specification as filed for detail ed description of substitutions, R-groups  and preferred embodiments
  MOD_RES (18)..(21): Any L- or D-natural or non-natural amino acid, and this range may     encompass 1 or 4 residues; see specification as filed for detailed  description of substitutions, R-groups and preferred emb
  c-term may be amidated
VPLSRTXRXTXIXISNQXXXXLKAVSKEMSKRSP

SEQ ID NO: 322 - protein, 34 aa, Artificial Sequence
  Description of Artificial Sequence: Synthetic peptide
  MOD_RES (8)..(9): Any L- or D-natural amino acid and any non-natural amino acid; see  specification as filed for detail ed description of substitutions, R-groups  and preferred embodiments
  MOD_RES (11)..(11): Any L- or D-natural amino acid and any non-natural amino acid; see  specification as filed for detail ed description of substitutions, R-groups  and preferred embodiments
  MOD_RES (13)..(13): Any L- or D-natural amino acid and any non-natural amino acid; see  specification as filed for detail ed description of substitutions, R-groups  and preferred embodiments
  MOD_RES (18)..(21): Any L- or D-natural or non-natural amino acid, and this range may     encompass 1 or 4 residues; see specification as filed for detailed  description of substitutions, R-groups and preferred emb
  c-term may be amidated
VPLSRTVXXTXIXISNQXXXXLKAVSKEMSKRSP

SEQ ID NO: 323 - protein, 34 aa, Artificial Sequence
  Description of Artificial Sequence: Synthetic peptide
  MOD_RES (14)..(14): Any L- or D-natural amino acid and any non-natural amino acid; see  specification as filed for detail ed description of substitutions, R-groups  and preferred embodiments
  MOD_RES (18)..(21): Any L- or D-natural or non-natural amino acid, and this range may     encompass 1 or 4 residues; see specification as filed for detailed  description of substitutions, R-groups and preferred emb
  c-term may be amidated
VPLSRTVRCTCISXSNQXXXXLKAVSKEMSKRSP

SEQ ID NO: 324 - protein, 34 aa, Artificial Sequence
  Description of Artificial Sequence: Synthetic peptide
  MOD_RES (1)..(1): Any L- or D-natural amino acid and any non-natural amino acid; see  specification as filed for detail ed description of substitutions, R-groups  and preferred embodiments
  MOD_RES (9)..(9): Any L- or D-natural amino acid and any non-natural amino acid; see  specification as filed for detail ed description of substitutions, R-groups  and preferred embodiments
  MOD_RES (11)..(11): Any L- or D-natural amino acid and any non-natural amino acid; see  specification as filed for detail ed description of substitutions, R-groups  and preferred embodiments
  MOD_RES (14)..(14): Any L- or D-natural amino acid and any non-natural amino acid; see  specification as filed for detail ed description of substitutions, R-groups  and preferred embodiments
  MOD_RES (18)..(21): Any L- or D-natural or non-natural amino acid, and this range may     encompass 1 or 4 residues; see specification as filed for detailed  description of substitutions, R-groups and preferred emb
  c-term may be amidated
XPLSRTVRXTXISXSNQXXXXLKAVSKEMSKRSP

SEQ ID NO: 325 - protein, 34 aa, Artificial Sequence
  Description of Artificial Sequence: Synthetic peptide
  MOD_RES (2)..(2): Any L- or D-natural amino acid and any non-natural amino acid; see  specification as filed for detail ed description of substitutions, R-groups  and preferred embodiments
  MOD_RES (9)..(9): Any L- or D-natural amino acid and any non-natural amino acid; see  specification as filed for detail ed description of substitutions, R-groups  and preferred embodiments
  MOD_RES (11)..(11): Any L- or D-natural amino acid and any non-natural amino acid; see  specification as filed for detail ed description of substitutions, R-groups  and preferred embodiments
  MOD_RES (14)..(14): Any L- or D-natural amino acid and any non-natural amino acid; see  specification as filed for detail ed description of substitutions, R-groups  and preferred embodiments
  MOD_RES (18)..(21): Any L- or D-natural or non-natural amino acid, and this range may     encompass 1 or 4 residues; see specification as filed for detailed  description of substitutions, R-groups and preferred emb
  c-term may be amidated
VXLSRTVRXTXISXSNQXXXXLKAVSKEMSKRSP

SEQ ID NO: 326 - protein, 34 aa, Artificial Sequence
  Description of Artificial Sequence: Synthetic peptide
  MOD_RES (3)..(3): Any L- or D-natural amino acid and any non-natural amino acid; see  specification as filed for detail ed description of substitutions, R-groups  and preferred embodiments
  MOD_RES (9)..(9): Any L- or D-natural amino acid and any non-natural amino acid; see  specification as filed for detail ed description of substitutions, R-groups  and preferred embodiments
  MOD_RES (11)..(11): Any L- or D-natural amino acid and any non-natural amino acid; see  specification as filed for detail ed description of substitutions, R-groups  and preferred embodiments
  MOD_RES (14)..(14): Any L- or D-natural amino acid and any non-natural amino acid; see  specification as filed for detail ed description of substitutions, R-groups  and preferred embodiments
  MOD_RES (18)..(21): Any L- or D-natural or non-natural amino acid, and this range may     encompass 1 or 4 residues; see specification as filed for detailed  description of substitutions, R-groups and preferred emb
  c-term may be amidated
VPXSRTVRXTXISXSNQXXXXLKAVSKEMSKRSP

SEQ ID NO: 327 - protein, 34 aa, Artificial Sequence
  Description of Artificial Sequence: Synthetic peptide
  MOD_RES (4)..(4): Any L- or D-natural amino acid and any non-natural amino acid; see  specification as filed for detail ed description of substitutions, R-groups  and preferred embodiments
  MOD_RES (9)..(9): Any L- or D-natural amino acid and any non-natural amino acid; see  specification as filed for detail ed description of substitutions, R-groups  and preferred embodiments
  MOD_RES (11)..(11): Any L- or D-natural amino acid and any non-natural amino acid; see  specification as filed for detail ed description of substitutions, R-groups  and preferred embodiments
  MOD_RES (14)..(14): Any L- or D-natural amino acid and any non-natural amino acid; see  specification as filed for detail ed description of substitutions, R-groups  and preferred embodiments
  MOD_RES (18)..(21): Any L- or D-natural or non-natural amino acid, and this range may     encompass 1 or 4 residues; see specification as filed for detailed  description of substitutions, R-groups and preferred emb
  c-term may be amidated
VPLXRTVRXTXISXSNQXXXXLKAVSKEMSKRSP

SEQ ID NO: 328 - protein, 34 aa, Artificial Sequence
  Description of Artificial Sequence: Synthetic peptide
  MOD_RES (5)..(5): Any L- or D-natural amino acid and any non-natural amino acid; see  specification as filed for detail ed description of substitutions, R-groups  and preferred embodiments
  MOD_RES (9)..(9): Any L- or D-natural amino acid and any non-natural amino acid; see  specification as filed for detail ed description of substitutions, R-groups  and preferred embodiments
  MOD_RES (11)..(11): Any L- or D-natural amino acid and any non-natural amino acid; see  specification as filed for detail ed description of substitutions, R-groups  and preferred embodiments
  MOD_RES (14)..(14): Any L- or D-natural amino acid and any non-natural amino acid; see  specification as filed for detail ed description of substitutions, R-groups  and preferred embodiments
  MOD_RES (18)..(21): Any L- or D-natural or non-natural amino acid, and this range may     encompass 1 or 4 residues; see specification as filed for detailed  description of substitutions, R-groups and preferred emb
  c-term may be amidated
VPLSXTVRXTXISXSNQXXXXLKAVSKEMSKRSP

SEQ ID NO: 329 - protein, 34 aa, Artificial Sequence
  Description of Artificial Sequence: Synthetic peptide
  MOD_RES (6)..(6): Any L- or D-natural amino acid and any non-natural amino acid; see  specification as filed for detail ed description of substitutions, R-groups  and preferred embodiments
  MOD_RES (9)..(9): Any L- or D-natural amino acid and any non-natural amino acid; see  specification as filed for detail ed description of substitutions, R-groups  and preferred embodiments
  MOD_RES (11)..(11): Any L- or D-natural amino acid and any non-natural amino acid; see  specification as filed for detail ed description of substitutions, R-groups  and preferred embodiments
  MOD_RES (14)..(14): Any L- or D-natural amino acid and any non-natural amino acid; see  specification as filed for detail ed description of substitutions, R-groups  and preferred embodiments
  MOD_RES (18)..(21): Any L- or D-natural or non-natural amino acid, and this range may     encompass 1 or 4 residues; see specification as filed for detailed  description of substitutions, R-groups and preferred emb
  c-term may be amidated
VPLSRXVRXTXISXSNQXXXXLKAVSKEMSKRSP

SEQ ID NO: 330 - protein, 34 aa, Artificial Sequence
  Description of Artificial Sequence: Synthetic peptide
  MOD_RES (7)..(7): Any L- or D-natural amino acid and any non-natural amino acid; see  specification as filed for detail ed description of substitutions, R-groups  and preferred embodiments
  MOD_RES (9)..(9): Any L- or D-natural amino acid and any non-natural amino acid; see  specification as filed for detail ed description of substitutions, R-groups  and preferred embodiments
  MOD_RES (11)..(11): Any L- or D-natural amino acid and any non-natural amino acid; see  specification as filed for detail ed description of substitutions, R-groups  and preferred embodiments
  MOD_RES (14)..(14): Any L- or D-natural amino acid and any non-natural amino acid; see  specification as filed for detail ed description of substitutions, R-groups  and preferred embodiments
  MOD_RES (18)..(21): Any L- or D-natural or non-natural amino acid, and this range may     encompass 1 or 4 residues; see specification as filed for detailed  description of substitutions, R-groups and preferred emb
  c-term may be amidated
VPLSRTXRXTXISXSNQXXXXLKAVSKEMSKRSP

SEQ ID NO: 331 - protein, 34 aa, Artificial Sequence
  Description of Artificial Sequence: Synthetic peptide
  MOD_RES (8)..(9): Any L- or D-natural amino acid and any non-natural amino acid; see  specification as filed for detail ed description of substitutions, R-groups  and preferred embodiments
  MOD_RES (11)..(11): Any L- or D-natural amino acid and any non-natural amino acid; see  specification as filed for detail ed description of substitutions, R-groups  and preferred embodiments
  MOD_RES (14)..(14): Any L- or D-natural amino acid and any non-natural amino acid; see  specification as filed for detail ed description of substitutions, R-groups  and preferred embodiments
  MOD_RES (18)..(21): Any L- or D-natural or non-natural amino acid, and this range may     encompass 1 or 4 residues; see specification as filed for detailed  description of substitutions, R-groups and preferred emb
  c-term may be amidated
VPLSRTVXXTXISXSNQXXXXLKAVSKEMSKRSP

SEQ ID NO: 332 - protein, 34 aa, Artificial Sequence
  Description of Artificial Sequence: Synthetic peptide
  MOD_RES (16)..(16): Any L- or D-natural amino acid and any non-natural amino acid; see  specification as filed for detail ed description of substitutions, R-groups  and preferred embodiments
  MOD_RES (18)..(21): Any L- or D-natural or non-natural amino acid, and this range may     encompass 1 or 4 residues; see specification as filed for detailed  description of substitutions, R-groups and preferred emb
  c-term may be amidated
VPLSRTVRCTCISISXQXXXXLKAVSKEMSKRSP

SEQ ID NO: 333 - protein, 34 aa, Artificial Sequence
  Description of Artificial Sequence: Synthetic peptide
  MOD_RES (1)..(1): Any L- or D-natural amino acid and any non-natural amino acid; see  specification as filed for detail ed description of substitutions, R-groups  and preferred embodiments
  MOD_RES (9)..(9): Any L- or D-natural amino acid and any non-natural amino acid; see  specification as filed for detail ed description of substitutions, R-groups  and preferred embodiments
  MOD_RES (11)..(11): Any L- or D-natural amino acid and any non-natural amino acid; see  specification as filed for detail ed description of substitutions, R-groups  and preferred embodiments
  MOD_RES (16)..(16): Any L- or D-natural amino acid and any non-natural amino acid; see  specification as filed for detail ed description of substitutions, R-groups  and preferred embodiments
  MOD_RES (18)..(21): Any L- or D-natural or non-natural amino acid, and this range may     encompass 1 or 4 residues; see specification as filed for detailed  description of substitutions, R-groups and preferred emb
  c-term may be amidated
XPLSRTVRXTXISISXQXXXXLKAVSKEMSKRSP

SEQ ID NO: 334 - protein, 34 aa, Artificial Sequence
  Description of Artificial Sequence: Synthetic peptide
  MOD_RES (2)..(2): Any L- or D-natural amino acid and any non-natural amino acid; see  specification as filed for detail ed description of substitutions, R-groups  and preferred embodiments
  MOD_RES (9)..(9): Any L- or D-natural amino acid and any non-natural amino acid; see  specification as filed for detail ed description of substitutions, R-groups  and preferred embodiments
  MOD_RES (11)..(11): Any L- or D-natural amino acid and any non-natural amino acid; see  specification as filed for detail ed description of substitutions, R-groups  and preferred embodiments
  MOD_RES (16)..(16): Any L- or D-natural amino acid and any non-natural amino acid; see  specification as filed for detail ed description of substitutions, R-groups  and preferred embodiments
  MOD_RES (18)..(21): Any L- or D-natural or non-natural amino acid, and this range may     encompass 1 or 4 residues; see specification as filed for detailed  description of substitutions, R-groups and preferred emb
  c-term may be amidated
VXLSRTVRXTXISISXQXXXXLKAVSKEMSKRSP

SEQ ID NO: 335 - protein, 34 aa, Artificial Sequence
  Description of Artificial Sequence: Synthetic peptide
  MOD_RES (3)..(3): Any L- or D-natural amino acid and any non-natural amino acid; see  specification as filed for detail ed description of substitutions, R-groups  and preferred embodiments
  MOD_RES (9)..(9): Any L- or D-natural amino acid and any non-natural amino acid; see  specification as filed for detail ed description of substitutions, R-groups  and preferred embodiments
  MOD_RES (11)..(11): Any L- or D-natural amino acid and any non-natural amino acid; see  specification as filed for detail ed description of substitutions, R-groups  and preferred embodiments
  MOD_RES (16)..(16): Any L- or D-natural amino acid and any non-natural amino acid; see  specification as filed for detail ed description of substitutions, R-groups  and preferred embodiments
  MOD_RES (18)..(21): Any L- or D-natural or non-natural amino acid, and this range may     encompass 1 or 4 residues; see specification as filed for detailed  description of substitutions, R-groups and preferred emb
  c-term may be amidated
VPXSRTVRXTXISISXQXXXXLKAVSKEMSKRSP

SEQ ID NO: 336 - protein, 34 aa, Artificial Sequence
  Description of Artificial Sequence: Synthetic peptide
  MOD_RES (4)..(4): Any L- or D-natural amino acid and any non-natural amino acid; see  specification as filed for detail ed description of substitutions, R-groups  and preferred embodiments
  MOD_RES (9)..(9): Any L- or D-natural amino acid and any non-natural amino acid; see  specification as filed for detail ed description of substitutions, R-groups  and preferred embodiments
  MOD_RES (11)..(11): Any L- or D-natural amino acid and any non-natural amino acid; see  specification as filed for detail ed description of substitutions, R-groups  and preferred embodiments
  MOD_RES (16)..(16): Any L- or D-natural amino acid and any non-natural amino acid; see  specification as filed for detail ed description of substitutions, R-groups  and preferred embodiments
  MOD_RES (18)..(21): Any L- or D-natural or non-natural amino acid, and this range may     encompass 1 or 4 residues; see specification as filed for detailed  description of substitutions, R-groups and preferred emb
  c-term may be amidated
VPLXRTVRXTXISISXQXXXXLKAVSKEMSKRSP

SEQ ID NO: 337 - protein, 34 aa, Artificial Sequence
  Description of Artificial Sequence: Synthetic peptide
  MOD_RES (5)..(5): Any L- or D-natural amino acid and any non-natural amino acid; see  specification as filed for detail ed description of substitutions, R-groups  and preferred embodiments
  MOD_RES (9)..(9): Any L- or D-natural amino acid and any non-natural amino acid; see  specification as filed for detail ed description of substitutions, R-groups  and preferred embodiments
  MOD_RES (11)..(11): Any L- or D-natural amino acid and any non-natural amino acid; see  specification as filed for detail ed description of substitutions, R-groups  and preferred embodiments
  MOD_RES (16)..(16): Any L- or D-natural amino acid and any non-natural amino acid; see  specification as filed for detail ed description of substitutions, R-groups  and preferred embodiments
  MOD_RES (18)..(21): Any L- or D-natural or non-natural amino acid, and this range may     encompass 1 or 4 residues; see specification as filed for detailed  description of substitutions, R-groups and preferred emb
  c-term may be amidated
VPLSXTVRXTXISISXQXXXXLKAVSKEMSKRSP

SEQ ID NO: 338 - protein, 34 aa, Artificial Sequence
  Description of Artificial Sequence: Synthetic peptide
  MOD_RES (6)..(6): Any L- or D-natural amino acid and any non-natural amino acid; see  specification as filed for detail ed description of substitutions, R-groups  and preferred embodiments
  MOD_RES (9)..(9): Any L- or D-natural amino acid and any non-natural amino acid; see  specification as filed for detail ed description of substitutions, R-groups  and preferred embodiments
  MOD_RES (11)..(11): Any L- or D-natural amino acid and any non-natural amino acid; see  specification as filed for detail ed description of substitutions, R-groups  and preferred embodiments
  MOD_RES (16)..(16): Any L- or D-natural amino acid and any non-natural amino acid; see  specification as filed for detail ed description of substitutions, R-groups  and preferred embodiments
  MOD_RES (18)..(21): Any L- or D-natural or non-natural amino acid, and this range may     encompass 1 or 4 residues; see specification as filed for detailed  description of substitutions, R-groups and preferred emb
  c-term may be amidated
VPLSRXVRXTXISISXQXXXXLKAVSKEMSKRSP

SEQ ID NO: 339 - protein, 34 aa, Artificial Sequence
  Description of Artificial Sequence: Synthetic peptide
  MOD_RES (7)..(7): Any L- or D-natural amino acid and any non-natural amino acid; see  specification as filed for detail ed description of substitutions, R-groups  and preferred embodiments
  MOD_RES (9)..(9): Any L- or D-natural amino acid and any non-natural amino acid; see  specification as filed for detail ed description of substitutions, R-groups  and preferred embodiments
  MOD_RES (11)..(11): Any L- or D-natural amino acid and any non-natural amino acid; see  specification as filed for detail ed description of substitutions, R-groups  and preferred embodiments
  MOD_RES (16)..(16): Any L- or D-natural amino acid and any non-natural amino acid; see  specification as filed for detail ed description of substitutions, R-groups  and preferred embodiments
  MOD_RES (18)..(21): Any L- or D-natural or non-natural amino acid, and this range may     encompass 1 or 4 residues; see specification as filed for detailed  description of substitutions, R-groups and preferred emb
  c-term may be amidated
VPLSRTXRXTXISISXQXXXXLKAVSKEMSKRSP

SEQ ID NO: 340 - protein, 34 aa, Artificial Sequence
  Description of Artificial Sequence: Synthetic peptide
  MOD_RES (8)..(9): Any L- or D-natural amino acid and any non-natural amino acid; see  specification as filed for detail ed description of substitutions, R-groups  and preferred embodiments
  MOD_RES (11)..(11): Any L- or D-natural amino acid and any non-natural amino acid; see  specification as filed for detail ed description of substitutions, R-groups  and preferred embodiments
  MOD_RES (16)..(16): Any L- or D-natural amino acid and any non-natural amino acid; see  specification as filed for detail ed description of substitutions, R-groups  and preferred embodiments
  MOD_RES (18)..(21): Any L- or D-natural or non-natural amino acid, and this range may     encompass 1 or 4 residues; see specification as filed for detailed  description of substitutions, R-groups and preferred emb
  c-term may be amidated
VPLSRTVXXTXISISXQXXXXLKAVSKEMSKRSP

SEQ ID NO: 341 - protein, 34 aa, Artificial Sequence
  Description of Artificial Sequence: Synthetic peptide
  MOD_RES (17)..(17): Any L- or D-natural amino acid and any non-natural amino acid; see  specification as filed for detail ed description of substitutions, R-groups  and preferred embodiments
  MOD_RES (18)..(21): Any L- or D-natural or non-natural amino acid, and this range may     encompass 1 or 4 residues; see specification as filed for detailed  description of substitutions, R-groups and preferred emb
  c-term may be amidated
VPLSRTVRCTCISISQXXXXXLKAVSKEMSKRSP

SEQ ID NO: 342 - protein, 34 aa, Artificial Sequence
  Description of Artificial Sequence: Synthetic peptide
  MOD_RES (1)..(1): Any L- or D-natural amino acid and any non-natural amino acid; see  specification as filed for detail ed description of substitutions, R-groups  and preferred embodiments
  MOD_RES (9)..(9): Any L- or D-natural amino acid and any non-natural amino acid; see  specification as filed for detail ed description of substitutions, R-groups  and preferred embodiments
  MOD_RES (11)..(11): Any L- or D-natural amino acid and any non-natural amino acid; see  specification as filed for detail ed description of substitutions, R-groups  and preferred embodiments
  MOD_RES (17)..(17): Any L- or D-natural amino acid and any non-natural amino acid; see  specification as filed for detail ed description of substitutions, R-groups  and preferred embodiments
  MOD_RES (18)..(21): Any L- or D-natural or non-natural amino acid, and this range may     encompass 1 or 4 residues; see specification as filed for detailed  description of substitutions, R-groups and preferred emb
  c-term may be amidated
XPLSRTVRXTXISISQXXXXXLKAVSKEMSKRSP

SEQ ID NO: 343 - protein, 34 aa, Artificial Sequence
  Description of Artificial Sequence: Synthetic peptide
  MOD_RES (2)..(2): Any L- or D-natural amino acid and any non-natural amino acid; see  specification as filed for detail ed description of substitutions, R-groups  and preferred embodiments
  MOD_RES (9)..(9): Any L- or D-natural amino acid and any non-natural amino acid; see  specification as filed for detail ed description of substitutions, R-groups  and preferred embodiments
  MOD_RES (11)..(11): Any L- or D-natural amino acid and any non-natural amino acid; see  specification as filed for detail ed description of substitutions, R-groups  and preferred embodiments
  MOD_RES (17)..(17): Any L- or D-natural amino acid and any non-natural amino acid; see  specification as filed for detail ed description of substitutions, R-groups  and preferred embodiments
  MOD_RES (18)..(21): Any L- or D-natural or non-natural amino acid, and this range may     encompass 1 or 4 residues; see specification as filed for detailed  description of substitutions, R-groups and preferred emb
  c-term may be amidated
VXLSRTVRXTXISISQXXXXXLKAVSKEMSKRSP

SEQ ID NO: 344 - protein, 34 aa, Artificial Sequence
  Description of Artificial Sequence: Synthetic peptide
  MOD_RES (3)..(3): Any L- or D-natural amino acid and any non-natural amino acid; see  specification as filed for detail ed description of substitutions, R-groups  and preferred embodiments
  MOD_RES (9)..(9): Any L- or D-natural amino acid and any non-natural amino acid; see  specification as filed for detail ed description of substitutions, R-groups  and preferred embodiments
  MOD_RES (11)..(11): Any L- or D-natural amino acid and any non-natural amino acid; see  specification as filed for detail ed description of substitutions, R-groups  and preferred embodiments
  MOD_RES (17)..(17): Any L- or D-natural amino acid and any non-natural amino acid; see  specification as filed for detail ed description of substitutions, R-groups  and preferred embodiments
  MOD_RES (18)..(21): Any L- or D-natural or non-natural amino acid, and this range may     encompass 1 or 4 residues; see specification as filed for detailed  description of substitutions, R-groups and preferred emb
  c-term may be amidated
VPXSRTVRXTXISISQXXXXXLKAVSKEMSKRSP

SEQ ID NO: 345 - protein, 34 aa, Artificial Sequence
  Description of Artificial Sequence: Synthetic peptide
  MOD_RES (4)..(4): Any L- or D-natural amino acid and any non-natural amino acid; see  specification as filed for detail ed description of substitutions, R-groups  and preferred embodiments
  MOD_RES (9)..(9): Any L- or D-natural amino acid and any non-natural amino acid; see  specification as filed for detail ed description of substitutions, R-groups  and preferred embodiments
  MOD_RES (11)..(11): Any L- or D-natural amino acid and any non-natural amino acid; see  specification as filed for detail ed description of substitutions, R-groups  and preferred embodiments
  MOD_RES (17)..(17): Any L- or D-natural amino acid and any non-natural amino acid; see  specification as filed for detail ed description of substitutions, R-groups  and preferred embodiments
  MOD_RES (18)..(21): Any L- or D-natural or non-natural amino acid, and this range may     encompass 1 or 4 residues; see specification as filed for detailed  description of substitutions, R-groups and preferred emb
  c-term may be amidated
VPLXRTVRXTXISISQXXXXXLKAVSKEMSKRSP

SEQ ID NO: 346 - protein, 34 aa, Artificial Sequence
  Description of Artificial Sequence: Synthetic peptide
  MOD_RES (5)..(5): Any L- or D-natural amino acid and any non-natural amino acid; see  specification as filed for detail ed description of substitutions, R-groups  and preferred embodiments
  MOD_RES (9)..(9): Any L- or D-natural amino acid and any non-natural amino acid; see  specification as filed for detail ed description of substitutions, R-groups  and preferred embodiments
  MOD_RES (11)..(11): Any L- or D-natural amino acid and any non-natural amino acid; see  specification as filed for detail ed description of substitutions, R-groups  and preferred embodiments
  MOD_RES (17)..(17): Any L- or D-natural amino acid and any non-natural amino acid; see  specification as filed for detail ed description of substitutions, R-groups  and preferred embodiments
  MOD_RES (18)..(21): Any L- or D-natural or non-natural amino acid, and this range may     encompass 1 or 4 residues; see specification as filed for detailed  description of substitutions, R-groups and preferred emb
  c-term may be amidated
VPLSXTVRXTXISISQXXXXXLKAVSKEMSKRSP

SEQ ID NO: 347 - protein, 34 aa, Artificial Sequence
  Description of Artificial Sequence: Synthetic peptide
  MOD_RES (6)..(6): Any L- or D-natural amino acid and any non-natural amino acid; see  specification as filed for detail ed description of substitutions, R-groups  and preferred embodiments
  MOD_RES (9)..(9): Any L- or D-natural amino acid and any non-natural amino acid; see  specification as filed for detail ed description of substitutions, R-groups  and preferred embodiments
  MOD_RES (11)..(11): Any L- or D-natural amino acid and any non-natural amino acid; see  specification as filed for detail ed description of substitutions, R-groups  and preferred embodiments
  MOD_RES (17)..(17): Any L- or D-natural amino acid and any non-natural amino acid; see  specification as filed for detail ed description of substitutions, R-groups  and preferred embodiments
  MOD_RES (18)..(21): Any L- or D-natural or non-natural amino acid, and this range may     encompass 1 or 4 residues; see specification as filed for detailed  description of substitutions, R-groups and preferred emb
  c-term may be amidated
VPLSRXVRXTXISISQXXXXXLKAVSKEMSKRSP

SEQ ID NO: 348 - protein, 34 aa, Artificial Sequence
  Description of Artificial Sequence: Synthetic peptide
  MOD_RES (7)..(7): Any L- or D-natural amino acid and any non-natural amino acid; see  specification as filed for detail ed description of substitutions, R-groups  and preferred embodiments
  MOD_RES (9)..(9): Any L- or D-natural amino acid and any non-natural amino acid; see  specification as filed for detail ed description of substitutions, R-groups  and preferred embodiments
  MOD_RES (11)..(11): Any L- or D-natural amino acid and any non-natural amino acid; see  specification as filed for detail ed description of substitutions, R-groups  and preferred embodiments
  MOD_RES (17)..(17): Any L- or D-natural amino acid and any non-natural amino acid; see  specification as filed for detail ed description of substitutions, R-groups  and preferred embodiments
  MOD_RES (18)..(21): Any L- or D-natural or non-natural amino acid, and this range may     encompass 1 or 4 residues; see specification as filed for detailed  description of substitutions, R-groups and preferred emb
  c-term may be amidated
VPLSRTXRXTXISISQXXXXXLKAVSKEMSKRSP

SEQ ID NO: 349 - protein, 34 aa, Artificial Sequence
  Description of Artificial Sequence: Synthetic peptide
  MOD_RES (8)..(9): Any L- or D-natural amino acid and any non-natural amino acid; see  specification as filed for detail ed description of substitutions, R-groups  and preferred embodiments
  MOD_RES (11)..(11): Any L- or D-natural amino acid and any non-natural amino acid; see  specification as filed for detail ed description of substitutions, R-groups  and preferred embodiments
  MOD_RES (17)..(17): Any L- or D-natural amino acid and any non-natural amino acid; see  specification as filed for detail ed description of substitutions, R-groups  and preferred embodiments
  MOD_RES (18)..(21): Any L- or D-natural or non-natural amino acid, and this range may     encompass 1 or 4 residues; see specification as filed for detailed  description of substitutions, R-groups and preferred emb
  c-term may be amidated
VPLSRTVXXTXISISQXXXXXLKAVSKEMSKRSP

SEQ ID NO: 350 - protein, 34 aa, Artificial Sequence
  Description of Artificial Sequence: Synthetic peptide
  MOD_RES (18)..(21): Any L- or D-natural or non-natural amino acid, and this range may     encompass 1 or 4 residues; see specification as filed for detailed  description of substitutions, R-groups and preferred emb
  c-term may be amidated
VPLSRTVRCTCISISNQXXXXLNPESKAIKNLLK

SEQ ID NO: 351 - protein, 34 aa, Artificial Sequence
  Description of Artificial Sequence: Synthetic peptide
  MOD_RES (1)..(1): Any L- or D-natural amino acid and any non-natural amino acid; see  specification as filed for detail ed description of substitutions, R-groups  and preferred embodiments
  MOD_RES (9)..(9): Any L- or D-natural amino acid and any non-natural amino acid; see  specification as filed for detail ed description of substitutions, R-groups  and preferred embodiments
  MOD_RES (11)..(11): Any L- or D-natural amino acid and any non-natural amino acid; see  specification as filed for detail ed description of substitutions, R-groups  and preferred embodiments
  MOD_RES (18)..(21): Any L- or D-natural or non-natural amino acid, and this range may     encompass 1 or 4 residues; see specification as filed for detailed  description of substitutions, R-groups and preferred emb
  c-term may be amidated
XPLSRTVRXTXISISNQXXXXLNPESKAIKNLLK

SEQ ID NO: 352 - protein, 34 aa, Artificial Sequence
  Description of Artificial Sequence: Synthetic peptide
  MOD_RES (2)..(2): Any L- or D-natural amino acid and any non-natural amino acid; see  specification as filed for detail ed description of substitutions, R-groups  and preferred embodiments
  MOD_RES (9)..(9): Any L- or D-natural amino acid and any non-natural amino acid; see  specification as filed for detail ed description of substitutions, R-groups  and preferred embodiments
  MOD_RES (11)..(11): Any L- or D-natural amino acid and any non-natural amino acid; see  specification as filed for detail ed description of substitutions, R-groups  and preferred embodiments
  MOD_RES (18)..(21): Any L- or D-natural or non-natural amino acid, and this range may     encompass 1 or 4 residues; see specification as filed for detailed  description of substitutions, R-groups and preferred emb
  c-term may be amidated
VXLSRTVRXTXISISNQXXXXLNPESKAIKNLLK

SEQ ID NO: 353 - protein, 34 aa, Artificial Sequence
  Description of Artificial Sequence: Synthetic peptide
  MOD_RES (3)..(3): Any L- or D-natural amino acid and any non-natural amino acid; see  specification as filed for detail ed description of substitutions, R-groups  and preferred embodiments
  MOD_RES (9)..(9): Any L- or D-natural amino acid and any non-natural amino acid; see  specification as filed for detail ed description of substitutions, R-groups  and preferred embodiments
  MOD_RES (11)..(11): Any L- or D-natural amino acid and any non-natural amino acid; see  specification as filed for detail ed description of substitutions, R-groups  and preferred embodiments
  MOD_RES (18)..(21): Any L- or D-natural or non-natural amino acid, and this range may     encompass 1 or 4 residues; see specification as filed for detailed  description of substitutions, R-groups and preferred emb
  c-term may be amidated
VPXSRTVRXTXISISNQXXXXLNPESKAIKNLLK

SEQ ID NO: 354 - protein, 34 aa, Artificial Sequence
  Description of Artificial Sequence: Synthetic peptide
  MOD_RES (4)..(4): Any L- or D-natural amino acid and any non-natural amino acid; see  specification as filed for detail ed description of substitutions, R-groups  and preferred embodiments
  MOD_RES (9)..(9): Any L- or D-natural amino acid and any non-natural amino acid; see  specification as filed for detail ed description of substitutions, R-groups  and preferred embodiments
  MOD_RES (11)..(11): Any L- or D-natural amino acid and any non-natural amino acid; see  specification as filed for detail ed description of substitutions, R-groups  and preferred embodiments
  MOD_RES (18)..(21): Any L- or D-natural or non-natural amino acid, and this range may     encompass 1 or 4 residues; see specification as filed for detailed  description of substitutions, R-groups and preferred emb
  c-term may be amidated
VPLXRTVRXTXISISNQXXXXLNPESKAIKNLLK

SEQ ID NO: 355 - protein, 34 aa, Artificial Sequence
  Description of Artificial Sequence: Synthetic peptide
  MOD_RES (5)..(5): Any L- or D-natural amino acid and any non-natural amino acid; see  specification as filed for detail ed description of substitutions, R-groups  and preferred embodiments
  MOD_RES (9)..(9): Any L- or D-natural amino acid and any non-natural amino acid; see  specification as filed for detail ed description of substitutions, R-groups  and preferred embodiments
  MOD_RES (11)..(11): Any L- or D-natural amino acid and any non-natural amino acid; see  specification as filed for detail ed description of substitutions, R-groups  and preferred embodiments
  MOD_RES (18)..(21): Any L- or D-natural or non-natural amino acid, and this range may     encompass 1 or 4 residues; see specification as filed for detailed  description of substitutions, R-groups and preferred emb
  c-term may be amidated
VPLSXTVRXTXISISNQXXXXLNPESKAIKNLLK

SEQ ID NO: 356 - protein, 34 aa, Artificial Sequence
  Description of Artificial Sequence: Synthetic peptide
  MOD_RES (6)..(6): Any L- or D-natural amino acid and any non-natural amino acid; see  specification as filed for detail ed description of substitutions, R-groups  and preferred embodiments
  MOD_RES (9)..(9): Any L- or D-natural amino acid and any non-natural amino acid; see  specification as filed for detail ed description of substitutions, R-groups  and preferred embodiments
  MOD_RES (11)..(11): Any L- or D-natural amino acid and any non-natural amino acid; see  specification as filed for detail ed description of substitutions, R-groups  and preferred embodiments
  MOD_RES (18)..(21): Any L- or D-natural or non-natural amino acid, and this range may     encompass 1 or 4 residues; see specification as filed for detailed  description of substitutions, R-groups and preferred emb
  c-term may be amidated
VPLSRXVRXTXISISNQXXXXLNPESKAIKNLLK

SEQ ID NO: 357 - protein, 34 aa, Artificial Sequence
  Description of Artificial Sequence: Synthetic peptide
  MOD_RES (7)..(7): Any L- or D-natural amino acid and any non-natural amino acid; see  specification as filed for detail ed description of substitutions, R-groups  and preferred embodiments
  MOD_RES (9)..(9): Any L- or D-natural amino acid and any non-natural amino acid; see  specification as filed for detail ed description of substitutions, R-groups  and preferred embodiments
  MOD_RES (11)..(11): Any L- or D-natural amino acid and any non-natural amino acid; see  specification as filed for detail ed description of substitutions, R-groups  and preferred embodiments
  MOD_RES (18)..(21): Any L- or D-natural or non-natural amino acid, and this range may     encompass 1 or 4 residues; see specification as filed for detailed  description of substitutions, R-groups and preferred emb
  c-term may be amidated
VPLSRTXRXTXISISNQXXXXLNPESKAIKNLLK

SEQ ID NO: 358 - protein, 34 aa, Artificial Sequence
  Description of Artificial Sequence: Synthetic peptide
  MOD_RES (8)..(9): Any L- or D-natural amino acid and any non-natural amino acid; see  specification as filed for detail ed description of substitutions, R-groups  and preferred embodiments
  MOD_RES (11)..(11): Any L- or D-natural amino acid and any non-natural amino acid; see  specification as filed for detail ed description of substitutions, R-groups  and preferred embodiments
  MOD_RES (18)..(21): Any L- or D-natural or non-natural amino acid, and this range may     encompass 1 or 4 residues; see specification as filed for detailed  description of substitutions, R-groups and preferred emb
  c-term may be amidated
VPLSRTVXXTXISISNQXXXXLNPESKAIKNLLK

SEQ ID NO: 359 - protein, 34 aa, Artificial Sequence
  Description of Artificial Sequence: Synthetic peptide
  MOD_RES (12)..(12): Any L- or D-natural amino acid and any non-natural amino acid; see  specification as filed for detail ed description of substitutions, R-groups  and preferred embodiments
  MOD_RES (18)..(21): Any L- or D-natural or non-natural amino acid, and this range may     encompass 1 or 4 residues; see specification as filed for detailed  description of substitutions, R-groups and preferred emb
  c-term may be amidated
VPLSRTVRCTCXSISNQXXXXLNPESKAIKNLLK

SEQ ID NO: 360 - protein, 34 aa, Artificial Sequence
  Description of Artificial Sequence: Synthetic peptide
  MOD_RES (1)..(1): Any L- or D-natural amino acid and any non-natural amino acid; see  specification as filed for detail ed description of substitutions, R-groups  and preferred embodiments
  MOD_RES (9)..(9): Any L- or D-natural amino acid and any non-natural amino acid; see  specification as filed for detail ed description of substitutions, R-groups  and preferred embodiments
  MOD_RES (11)..(12): Any L- or D-natural amino acid and any non-natural amino acid; see  specification as filed for detail ed description of substitutions, R-groups  and preferred embodiments
  MOD_RES (18)..(21): Any L- or D-natural or non-natural amino acid, and this range may     encompass 1 or 4 residues; see specification as filed for detailed  description of substitutions, R-groups and preferred emb
  c-term may be amidated
XPLSRTVRXTXXSISNQXXXXLNPESKAIKNLLK

SEQ ID NO: 361 - protein, 34 aa, Artificial Sequence
  Description of Artificial Sequence: Synthetic peptide
  MOD_RES (2)..(2): Any L- or D-natural amino acid and any non-natural amino acid; see  specification as filed for detail ed description of substitutions, R-groups  and preferred embodiments
  MOD_RES (9)..(9): Any L- or D-natural amino acid and any non-natural amino acid; see  specification as filed for detail ed description of substitutions, R-groups  and preferred embodiments
  MOD_RES (11)..(12): Any L- or D-natural amino acid and any non-natural amino acid; see  specification as filed for detail ed description of substitutions, R-groups  and preferred embodiments
  MOD_RES (18)..(21): Any L- or D-natural or non-natural amino acid, and this range may     encompass 1 or 4 residues; see specification as filed for detailed  description of substitutions, R-groups and preferred emb
  c-term may be amidated
VXLSRTVRXTXXSISNQXXXXLNPESKAIKNLLK

SEQ ID NO: 362 - protein, 34 aa, Artificial Sequence
  Description of Artificial Sequence: Synthetic peptide
  MOD_RES (3)..(3): Any L- or D-natural amino acid and any non-natural amino acid; see  specification as filed for detail ed description of substitutions, R-groups  and preferred embodiments
  MOD_RES (9)..(9): Any L- or D-natural amino acid and any non-natural amino acid; see  specification as filed for detail ed description of substitutions, R-groups  and preferred embodiments
  MOD_RES (11)..(12): Any L- or D-natural amino acid and any non-natural amino acid; see  specification as filed for detail ed description of substitutions, R-groups  and preferred embodiments
  MOD_RES (18)..(21): Any L- or D-natural or non-natural amino acid, and this range may     encompass 1 or 4 residues; see specification as filed for detailed  description of substitutions, R-groups and preferred emb
  c-term may be amidated
VPXSRTVRXTXXSISNQXXXXLNPESKAIKNLLK

SEQ ID NO: 363 - protein, 34 aa, Artificial Sequence
  Description of Artificial Sequence: Synthetic peptide
  MOD_RES (4)..(4): Any L- or D-natural amino acid and any non-natural amino acid; see  specification as filed for detail ed description of substitutions, R-groups  and preferred embodiments
  MOD_RES (9)..(9): Any L- or D-natural amino acid and any non-natural amino acid; see  specification as filed for detail ed description of substitutions, R-groups  and preferred embodiments
  MOD_RES (11)..(12): Any L- or D-natural amino acid and any non-natural amino acid; see  specification as filed for detail ed description of substitutions, R-groups  and preferred embodiments
  MOD_RES (18)..(21): Any L- or D-natural or non-natural amino acid, and this range may     encompass 1 or 4 residues; see specification as filed for detailed  description of substitutions, R-groups and preferred emb
  c-term may be amidated
VPLXRTVRXTXXSISNQXXXXLNPESKAIKNLLK

SEQ ID NO: 364 - protein, 34 aa, Artificial Sequence
  Description of Artificial Sequence: Synthetic peptide
  MOD_RES (5)..(5): Any L- or D-natural amino acid and any non-natural amino acid; see  specification as filed for detail ed description of substitutions, R-groups  and preferred embodiments
  MOD_RES (9)..(9): Any L- or D-natural amino acid and any non-natural amino acid; see  specification as filed for detail ed description of substitutions, R-groups  and preferred embodiments
  MOD_RES (11)..(12): Any L- or D-natural amino acid and any non-natural amino acid; see  specification as filed for detail ed description of substitutions, R-groups  and preferred embodiments
  MOD_RES (18)..(21): Any L- or D-natural or non-natural amino acid, and this range may     encompass 1 or 4 residues; see specification as filed for detailed  description of substitutions, R-groups and preferred emb
  c-term may be amidated
VPLSXTVRXTXXSISNQXXXXLNPESKAIKNLLK

SEQ ID NO: 365 - protein, 34 aa, Artificial Sequence
  Description of Artificial Sequence: Synthetic peptide
  MOD_RES (6)..(6): Any L- or D-natural amino acid and any non-natural amino acid; see  specification as filed for detail ed description of substitutions, R-groups  and preferred embodiments
  MOD_RES (9)..(9): Any L- or D-natural amino acid and any non-natural amino acid; see  specification as filed for detail ed description of substitutions, R-groups  and preferred embodiments
  MOD_RES (11)..(12): Any L- or D-natural amino acid and any non-natural amino acid; see  specification as filed for detail ed description of substitutions, R-groups  and preferred embodiments
  MOD_RES (18)..(21): Any L- or D-natural or non-natural amino acid, and this range may     encompass 1 or 4 residues; see specification as filed for detailed  description of substitutions, R-groups and preferred emb
  c-term may be amidated
VPLSRXVRXTXXSISNQXXXXLNPESKAIKNLLK

SEQ ID NO: 366 - protein, 34 aa, Artificial Sequence
  Description of Artificial Sequence: Synthetic peptide
  MOD_RES (7)..(7): Any L- or D-natural amino acid and any non-natural amino acid; see  specification as filed for detail ed description of substitutions, R-groups  and preferred embodiments
  MOD_RES (9)..(9): Any L- or D-natural amino acid and any non-natural amino acid; see  specification as filed for detail ed description of substitutions, R-groups  and preferred embodiments
  MOD_RES (11)..(12): Any L- or D-natural amino acid and any non-natural amino acid; see  specification as filed for detail ed description of substitutions, R-groups  and preferred embodiments
  MOD_RES (18)..(21): Any L- or D-natural or non-natural amino acid, and this range may     encompass 1 or 4 residues; see specification as filed for detailed  description of substitutions, R-groups and preferred emb
  c-term may be amidated
VPLSRTXRXTXXSISNQXXXXLNPESKAIKNLLK

SEQ ID NO: 367 - protein, 34 aa, Artificial Sequence
  Description of Artificial Sequence: Synthetic peptide
  MOD_RES (8)..(9): Any L- or D-natural amino acid and any non-natural amino acid; see  specification as filed for detail ed description of substitutions, R-groups  and preferred embodiments
  MOD_RES (11)..(12): Any L- or D-natural amino acid and any non-natural amino acid; see  specification as filed for detail ed description of substitutions, R-groups  and preferred embodiments
  MOD_RES (18)..(21): Any L- or D-natural or non-natural amino acid, and this range may     encompass 1 or 4 residues; see specification as filed for detailed  description of substitutions, R-groups and preferred emb
  c-term may be amidated
VPLSRTVXXTXXSISNQXXXXLNPESKAIKNLLK

SEQ ID NO: 368 - protein, 34 aa, Artificial Sequence
  Description of Artificial Sequence: Synthetic peptide
  MOD_RES (13)..(13): Any L- or D-natural amino acid and any non-natural amino acid; see  specification as filed for detail ed description of substitutions, R-groups  and preferred embodiments
  MOD_RES (18)..(21): Any L- or D-natural or non-natural amino acid, and this range may     encompass 1 or 4 residues; see specification as filed for detailed  description of substitutions, R-groups and preferred emb
  c-term may be amidated
VPLSRTVRCTCIXISNQXXXXLNPESKAIKNLLK

SEQ ID NO: 369 - protein, 34 aa, Artificial Sequence
  Description of Artificial Sequence: Synthetic peptide
  MOD_RES (1)..(1): Any L- or D-natural amino acid and any non-natural amino acid; see  specification as filed for detail ed description of substitutions, R-groups  and preferred embodiments
  MOD_RES (9)..(9): Any L- or D-natural amino acid and any non-natural amino acid; see  specification as filed for detail ed description of substitutions, R-groups  and preferred embodiments
  MOD_RES (11)..(11): Any L- or D-natural amino acid and any non-natural amino acid; see  specification as filed for detail ed description of substitutions, R-groups  and preferred embodiments
  MOD_RES (13)..(13): Any L- or D-natural amino acid and any non-natural amino acid; see  specification as filed for detail ed description of substitutions, R-groups  and preferred embodiments
  MOD_RES (18)..(21): Any L- or D-natural or non-natural amino acid, and this range may     encompass 1 or 4 residues; see specification as filed for detailed  description of substitutions, R-groups and preferred emb
  c-term may be amidated
XPLSRTVRXTXIXISNQXXXXLNPESKAIKNLLK

SEQ ID NO: 370 - protein, 34 aa, Artificial Sequence
  Description of Artificial Sequence: Synthetic peptide
  MOD_RES (2)..(2): Any L- or D-natural amino acid and any non-natural amino acid; see  specification as filed for detail ed description of substitutions, R-groups  and preferred embodiments
  MOD_RES (9)..(9): Any L- or D-natural amino acid and any non-natural amino acid; see  specification as filed for detail ed description of substitutions, R-groups  and preferred embodiments
  MOD_RES (11)..(11): Any L- or D-natural amino acid and any non-natural amino acid; see  specification as filed for detail ed description of substitutions, R-groups  and preferred embodiments
  MOD_RES (13)..(13): Any L- or D-natural amino acid and any non-natural amino acid; see  specification as filed for detail ed description of substitutions, R-groups  and preferred embodiments
  MOD_RES (18)..(21): Any L- or D-natural or non-natural amino acid, and this range may     encompass 1 or 4 residues; see specification as filed for detailed  description of substitutions, R-groups and preferred emb
  c-term may be amidated
VXLSRTVRXTXIXISNQXXXXLNPESKAIKNLLK

SEQ ID NO: 371 - protein, 34 aa, Artificial Sequence
  Description of Artificial Sequence: Synthetic peptide
  MOD_RES (3)..(3): Any L- or D-natural amino acid and any non-natural amino acid; see  specification as filed for detail ed description of substitutions, R-groups  and preferred embodiments
  MOD_RES (9)..(9): Any L- or D-natural amino acid and any non-natural amino acid; see  specification as filed for detail ed description of substitutions, R-groups  and preferred embodiments
  MOD_RES (11)..(11): Any L- or D-natural amino acid and any non-natural amino acid; see  specification as filed for detail ed description of substitutions, R-groups  and preferred embodiments
  MOD_RES (13)..(13): Any L- or D-natural amino acid and any non-natural amino acid; see  specification as filed for detail ed description of substitutions, R-groups  and preferred embodiments
  MOD_RES (18)..(21): Any L- or D-natural or non-natural amino acid, and this range may     encompass 1 or 4 residues; see specification as filed for detailed  description of substitutions, R-groups and preferred emb
  c-term may be amidated
VPXSRTVRXTXIXISNQXXXXLNPESKAIKNLLK

SEQ ID NO: 372 - protein, 34 aa, Artificial Sequence
  Description of Artificial Sequence: Synthetic peptide
  MOD_RES (4)..(4): Any L- or D-natural amino acid and any non-natural amino acid; see  specification as filed for detail ed description of substitutions, R-groups  and preferred embodiments
  MOD_RES (9)..(9): Any L- or D-natural amino acid and any non-natural amino acid; see  specification as filed for detail ed description of substitutions, R-groups  and preferred embodiments
  MOD_RES (11)..(11): Any L- or D-natural amino acid and any non-natural amino acid; see  specification as filed for detail ed description of substitutions, R-groups  and preferred embodiments
  MOD_RES (13)..(13): Any L- or D-natural amino acid and any non-natural amino acid; see  specification as filed for detail ed description of substitutions, R-groups  and preferred embodiments
  MOD_RES (18)..(21): Any L- or D-natural or non-natural amino acid, and this range may     encompass 1 or 4 residues; see specification as filed for detailed  description of substitutions, R-groups and preferred emb
  c-term may be amidated
VPLXRTVRXTXIXISNQXXXXLNPESKAIKNLLK

SEQ ID NO: 373 - protein, 34 aa, Artificial Sequence
  Description of Artificial Sequence: Synthetic peptide
  MOD_RES (5)..(5): Any L- or D-natural amino acid and any non-natural amino acid; see  specification as filed for detail ed description of substitutions, R-groups  and preferred embodiments
  MOD_RES (9)..(9): Any L- or D-natural amino acid and any non-natural amino acid; see  specification as filed for detail ed description of substitutions, R-groups  and preferred embodiments
  MOD_RES (11)..(11): Any L- or D-natural amino acid and any non-natural amino acid; see  specification as filed for detail ed description of substitutions, R-groups  and preferred embodiments
  MOD_RES (13)..(13): Any L- or D-natural amino acid and any non-natural amino acid; see  specification as filed for detail ed description of substitutions, R-groups  and preferred embodiments
  MOD_RES (18)..(21): Any L- or D-natural or non-natural amino acid, and this range may     encompass 1 or 4 residues; see specification as filed for detailed  description of substitutions, R-groups and preferred emb
  c-term may be amidated
VPLSXTVRXTXIXISNQXXXXLNPESKAIKNLLK

SEQ ID NO: 374 - protein, 34 aa, Artificial Sequence
  Description of Artificial Sequence: Synthetic peptide
  MOD_RES (6)..(6): Any L- or D-natural amino acid and any non-natural amino acid; see  specification as filed for detail ed description of substitutions, R-groups  and preferred embodiments
  MOD_RES (9)..(9): Any L- or D-natural amino acid and any non-natural amino acid; see  specification as filed for detail ed description of substitutions, R-groups  and preferred embodiments
  MOD_RES (11)..(11): Any L- or D-natural amino acid and any non-natural amino acid; see  specification as filed for detail ed description of substitutions, R-groups  and preferred embodiments
  MOD_RES (13)..(13): Any L- or D-natural amino acid and any non-natural amino acid; see  specification as filed for detail ed description of substitutions, R-groups  and preferred embodiments
  MOD_RES (18)..(21): Any L- or D-natural or non-natural amino acid, and this range may     encompass 1 or 4 residues; see specification as filed for detailed  description of substitutions, R-groups and preferred emb
  c-term may be amidated
VPLSRXVRXTXIXISNQXXXXLNPESKAIKNLLK

SEQ ID NO: 375 - protein, 34 aa, Artificial Sequence
  Description of Artificial Sequence: Synthetic peptide
  MOD_RES (7)..(7): Any L- or D-natural amino acid and any non-natural amino acid; see  specification as filed for detail ed description of substitutions, R-groups  and preferred embodiments
  MOD_RES (9)..(9): Any L- or D-natural amino acid and any non-natural amino acid; see  specification as filed for detail ed description of substitutions, R-groups  and preferred embodiments
  MOD_RES (11)..(11): Any L- or D-natural amino acid and any non-natural amino acid; see  specification as filed for detail ed description of substitutions, R-groups  and preferred embodiments
  MOD_RES (13)..(13): Any L- or D-natural amino acid and any non-natural amino acid; see  specification as filed for detail ed description of substitutions, R-groups  and preferred embodiments
  MOD_RES (18)..(21): Any L- or D-natural or non-natural amino acid, and this range may     encompass 1 or 4 residues; see specification as filed for detailed  description of substitutions, R-groups and preferred emb
  c-term may be amidated
VPLSRTXRXTXIXISNQXXXXLNPESKAIKNLLK

SEQ ID NO: 376 - protein, 34 aa, Artificial Sequence
  Description of Artificial Sequence: Synthetic peptide
  MOD_RES (8)..(9): Any L- or D-natural amino acid and any non-natural amino acid; see  specification as filed for detail ed description of substitutions, R-groups  and preferred embodiments
  MOD_RES (11)..(11): Any L- or D-natural amino acid and any non-natural amino acid; see  specification as filed for detail ed description of substitutions, R-groups  and preferred embodiments
  MOD_RES (13)..(13): Any L- or D-natural amino acid and any non-natural amino acid; see  specification as filed for detail ed description of substitutions, R-groups  and preferred embodiments
  MOD_RES (18)..(21): Any L- or D-natural or non-natural amino acid, and this range may     encompass 1 or 4 residues; see specification as filed for detailed  description of substitutions, R-groups and preferred emb
  c-term may be amidated
VPLSRTVXXTXIXISNQXXXXLNPESKAIKNLLK

SEQ ID NO: 377 - protein, 34 aa, Artificial Sequence
  Description of Artificial Sequence: Synthetic peptide
  MOD_RES (14)..(14): Any L- or D-natural amino acid and any non-natural amino acid; see  specification as filed for detail ed description of substitutions, R-groups  and preferred embodiments
  MOD_RES (18)..(21): Any L- or D-natural or non-natural amino acid, and this range may     encompass 1 or 4 residues; see specification as filed for detailed  description of substitutions, R-groups and preferred emb
  c-term may be amidated
VPLSRTVRCTCISXSNQXXXXLNPESKAIKNLLK

SEQ ID NO: 378 - protein, 34 aa, Artificial Sequence
  Description of Artificial Sequence: Synthetic peptide
  MOD_RES (1)..(1): Any L- or D-natural amino acid and any non-natural amino acid; see  specification as filed for detail ed description of substitutions, R-groups  and preferred embodiments
  MOD_RES (9)..(9): Any L- or D-natural amino acid and any non-natural amino acid; see  specification as filed for detail ed description of substitutions, R-groups  and preferred embodiments
  MOD_RES (11)..(11): Any L- or D-natural amino acid and any non-natural amino acid; see  specification as filed for detail ed description of substitutions, R-groups  and preferred embodiments
  MOD_RES (14)..(14): Any L- or D-natural amino acid and any non-natural amino acid; see  specification as filed for detail ed description of substitutions, R-groups  and preferred embodiments
  MOD_RES (18)..(21): Any L- or D-natural or non-natural amino acid, and this range may     encompass 1 or 4 residues; see specification as filed for detailed  description of substitutions, R-groups and preferred emb
  c-term may be amidated
XPLSRTVRXTXISXSNQXXXXLNPESKAIKNLLK

SEQ ID NO: 379 - protein, 34 aa, Artificial Sequence
  Description of Artificial Sequence: Synthetic peptide
  MOD_RES (2)..(2): Any L- or D-natural amino acid and any non-natural amino acid; see  specification as filed for detail ed description of substitutions, R-groups  and preferred embodiments
  MOD_RES (9)..(9): Any L- or D-natural amino acid and any non-natural amino acid; see  specification as filed for detail ed description of substitutions, R-groups  and preferred embodiments
  MOD_RES (11)..(11): Any L- or D-natural amino acid and any non-natural amino acid; see  specification as filed for detail ed description of substitutions, R-groups  and preferred embodiments
  MOD_RES (14)..(14): Any L- or D-natural amino acid and any non-natural amino acid; see  specification as filed for detail ed description of substitutions, R-groups  and preferred embodiments
  MOD_RES (18)..(21): Any L- or D-natural or non-natural amino acid, and this range may     encompass 1 or 4 residues; see specification as filed for detailed  description of substitutions, R-groups and preferred emb
  c-term may be amidated
VXLSRTVRXTXISXSNQXXXXLNPESKAIKNLLK

SEQ ID NO: 380 - protein, 34 aa, Artificial Sequence
  Description of Artificial Sequence: Synthetic peptide
  MOD_RES (3)..(3): Any L- or D-natural amino acid and any non-natural amino acid; see  specification as filed for detail ed description of substitutions, R-groups  and preferred embodiments
  MOD_RES (9)..(9): Any L- or D-natural amino acid and any non-natural amino acid; see  specification as filed for detail ed description of substitutions, R-groups  and preferred embodiments
  MOD_RES (11)..(11): Any L- or D-natural amino acid and any non-natural amino acid; see  specification as filed for detail ed description of substitutions, R-groups  and preferred embodiments
  MOD_RES (14)..(14): Any L- or D-natural amino acid and any non-natural amino acid; see  specification as filed for detail ed description of substitutions, R-groups  and preferred embodiments
  MOD_RES (18)..(21): Any L- or D-natural or non-natural amino acid, and this range may     encompass 1 or 4 residues; see specification as filed for detailed  description of substitutions, R-groups and preferred emb
  c-term may be amidated
VPXSRTVRXTXISXSNQXXXXLNPESKAIKNLLK

SEQ ID NO: 381 - protein, 34 aa, Artificial Sequence
  Description of Artificial Sequence: Synthetic peptide
  MOD_RES (4)..(4): Any L- or D-natural amino acid and any non-natural amino acid; see  specification as filed for detail ed description of substitutions, R-groups  and preferred embodiments
  MOD_RES (9)..(9): Any L- or D-natural amino acid and any non-natural amino acid; see  specification as filed for detail ed description of substitutions, R-groups  and preferred embodiments
  MOD_RES (11)..(11): Any L- or D-natural amino acid and any non-natural amino acid; see  specification as filed for detail ed description of substitutions, R-groups  and preferred embodiments
  MOD_RES (14)..(14): Any L- or D-natural amino acid and any non-natural amino acid; see  specification as filed for detail ed description of substitutions, R-groups  and preferred embodiments
  MOD_RES (18)..(21): Any L- or D-natural or non-natural amino acid, and this range may     encompass 1 or 4 residues; see specification as filed for detailed  description of substitutions, R-groups and preferred emb
  c-term may be amidated
VPLXRTVRXTXISXSNQXXXXLNPESKAIKNLLK

SEQ ID NO: 382 - protein, 34 aa, Artificial Sequence
  Description of Artificial Sequence: Synthetic peptide
  MOD_RES (5)..(5): Any L- or D-natural amino acid and any non-natural amino acid; see  specification as filed for detail ed description of substitutions, R-groups  and preferred embodiments
  MOD_RES (9)..(9): Any L- or D-natural amino acid and any non-natural amino acid; see  specification as filed for detail ed description of substitutions, R-groups  and preferred embodiments
  MOD_RES (11)..(11): Any L- or D-natural amino acid and any non-natural amino acid; see  specification as filed for detail ed description of substitutions, R-groups  and preferred embodiments
  MOD_RES (14)..(14): Any L- or D-natural amino acid and any non-natural amino acid; see  specification as filed for detail ed description of substitutions, R-groups  and preferred embodiments
  MOD_RES (18)..(21): Any L- or D-natural or non-natural amino acid, and this range may     encompass 1 or 4 residues; see specification as filed for detailed  description of substitutions, R-groups and preferred emb
  c-term may be amidated
VPLSXTVRXTXISXSNQXXXXLNPESKAIKNLLK

SEQ ID NO: 383 - protein, 34 aa, Artificial Sequence
  Description of Artificial Sequence: Synthetic peptide
  MOD_RES (6)..(6): Any L- or D-natural amino acid and any non-natural amino acid; see  specification as filed for detail ed description of substitutions, R-groups  and preferred embodiments
  MOD_RES (9)..(9): Any L- or D-natural amino acid and any non-natural amino acid; see  specification as filed for detail ed description of substitutions, R-groups  and preferred embodiments
  MOD_RES (11)..(11): Any L- or D-natural amino acid and any non-natural amino acid; see  specification as filed for detail ed description of substitutions, R-groups  and preferred embodiments
  MOD_RES (14)..(14): Any L- or D-natural amino acid and any non-natural amino acid; see  specification as filed for detail ed description of substitutions, R-groups  and preferred embodiments
  MOD_RES (18)..(21): Any L- or D-natural or non-natural amino acid, and this range may     encompass 1 or 4 residues; see specification as filed for detailed  description of substitutions, R-groups and preferred emb
  c-term may be amidated
VPLSRXVRXTXISXSNQXXXXLNPESKAIKNLLK

SEQ ID NO: 384 - protein, 34 aa, Artificial Sequence
  Description of Artificial Sequence: Synthetic peptide
  MOD_RES (7)..(7): Any L- or D-natural amino acid and any non-natural amino acid; see  specification as filed for detail ed description of substitutions, R-groups  and preferred embodiments
  MOD_RES (9)..(9): Any L- or D-natural amino acid and any non-natural amino acid; see  specification as filed for detail ed description of substitutions, R-groups  and preferred embodiments
  MOD_RES (11)..(11): Any L- or D-natural amino acid and any non-natural amino acid; see  specification as filed for detail ed description of substitutions, R-groups  and preferred embodiments
  MOD_RES (14)..(14): Any L- or D-natural amino acid and any non-natural amino acid; see  specification as filed for detail ed description of substitutions, R-groups  and preferred embodiments
  MOD_RES (18)..(21): Any L- or D-natural or non-natural amino acid, and this range may     encompass 1 or 4 residues; see specification as filed for detailed  description of substitutions, R-groups and preferred emb
  c-term may be amidated
VPLSRTXRXTXISXSNQXXXXLNPESKAIKNLLK

SEQ ID NO: 385 - protein, 34 aa, Artificial Sequence
  Description of Artificial Sequence: Synthetic peptide
  MOD_RES (8)..(9): Any L- or D-natural amino acid and any non-natural amino acid; see  specification as filed for detail ed description of substitutions, R-groups  and preferred embodiments
  MOD_RES (11)..(11): Any L- or D-natural amino acid and any non-natural amino acid; see  specification as filed for detail ed description of substitutions, R-groups  and preferred embodiments
  MOD_RES (14)..(14): Any L- or D-natural amino acid and any non-natural amino acid; see  specification as filed for detail ed description of substitutions, R-groups  and preferred embodiments
  MOD_RES (18)..(21): Any L- or D-natural or non-natural amino acid, and this range may     encompass 1 or 4 residues; see specification as filed for detailed  description of substitutions, R-groups and preferred emb
  c-term may be amidated
VPLSRTVXXTXISXSNQXXXXLNPESKAIKNLLK

SEQ ID NO: 386 - protein, 34 aa, Artificial Sequence
  Description of Artificial Sequence: Synthetic peptide
  MOD_RES (16)..(16): Any L- or D-natural amino acid and any non-natural amino acid; see  specification as filed for detail ed description of substitutions, R-groups  and preferred embodiments
  MOD_RES (18)..(21): Any L- or D-natural or non-natural amino acid, and this range may     encompass 1 or 4 residues; see specification as filed for detailed  description of substitutions, R-groups and preferred emb
  c-term may be amidated
VPLSRTVRCTCISISXQXXXXLNPESKAIKNLLK

SEQ ID NO: 387 - protein, 34 aa, Artificial Sequence
  Description of Artificial Sequence: Synthetic peptide
  MOD_RES (1)..(1): Any L- or D-natural amino acid and any non-natural amino acid; see  specification as filed for detail ed description of substitutions, R-groups  and preferred embodiments
  MOD_RES (9)..(9): Any L- or D-natural amino acid and any non-natural amino acid; see  specification as filed for detail ed description of substitutions, R-groups  and preferred embodiments
  MOD_RES (11)..(11): Any L- or D-natural amino acid and any non-natural amino acid; see  specification as filed for detail ed description of substitutions, R-groups  and preferred embodiments
  MOD_RES (16)..(16): Any L- or D-natural amino acid and any non-natural amino acid; see  specification as filed for detail ed description of substitutions, R-groups  and preferred embodiments
  MOD_RES (18)..(21): Any L- or D-natural or non-natural amino acid, and this range may     encompass 1 or 4 residues; see specification as filed for detailed  description of substitutions, R-groups and preferred emb
  c-term may be amidated
XPLSRTVRXTXISISXQXXXXLNPESKAIKNLLK

SEQ ID NO: 388 - protein, 34 aa, Artificial Sequence
  Description of Artificial Sequence: Synthetic peptide
  MOD_RES (2)..(2): Any L- or D-natural amino acid and any non-natural amino acid; see  specification as filed for detail ed description of substitutions, R-groups  and preferred embodiments
  MOD_RES (9)..(9): Any L- or D-natural amino acid and any non-natural amino acid; see  specification as filed for detail ed description of substitutions, R-groups  and preferred embodiments
  MOD_RES (11)..(11): Any L- or D-natural amino acid and any non-natural amino acid; see  specification as filed for detail ed description of substitutions, R-groups  and preferred embodiments
  MOD_RES (16)..(16): Any L- or D-natural amino acid and any non-natural amino acid; see  specification as filed for detail ed description of substitutions, R-groups  and preferred embodiments
  MOD_RES (18)..(21): Any L- or D-natural or non-natural amino acid, and this range may     encompass 1 or 4 residues; see specification as filed for detailed  description of substitutions, R-groups and preferred emb
  c-term may be amidated
VXLSRTVRXTXISISXQXXXXLNPESKAIKNLLK

SEQ ID NO: 389 - protein, 34 aa, Artificial Sequence
  Description of Artificial Sequence: Synthetic peptide
  MOD_RES (3)..(3): Any L- or D-natural amino acid and any non-natural amino acid; see  specification as filed for detail ed description of substitutions, R-groups  and preferred embodiments
  MOD_RES (9)..(9): Any L- or D-natural amino acid and any non-natural amino acid; see  specification as filed for detail ed description of substitutions, R-groups  and preferred embodiments
  MOD_RES (11)..(11): Any L- or D-natural amino acid and any non-natural amino acid; see  specification as filed for detail ed description of substitutions, R-groups  and preferred embodiments
  MOD_RES (16)..(16): Any L- or D-natural amino acid and any non-natural amino acid; see  specification as filed for detail ed description of substitutions, R-groups  and preferred embodiments
  MOD_RES (18)..(21): Any L- or D-natural or non-natural amino acid, and this range may     encompass 1 or 4 residues; see specification as filed for detailed  description of substitutions, R-groups and preferred emb
  c-term may be amidated
VPXSRTVRXTXISISXQXXXXLNPESKAIKNLLK

SEQ ID NO: 390 - protein, 34 aa, Artificial Sequence
  Description of Artificial Sequence: Synthetic peptide
  MOD_RES (4)..(4): Any L- or D-natural amino acid and any non-natural amino acid; see  specification as filed for detail ed description of substitutions, R-groups  and preferred embodiments
  MOD_RES (9)..(9): Any L- or D-natural amino acid and any non-natural amino acid; see  specification as filed for detail ed description of substitutions, R-groups  and preferred embodiments
  MOD_RES (11)..(11): Any L- or D-natural amino acid and any non-natural amino acid; see  specification as filed for detail ed description of substitutions, R-groups  and preferred embodiments
  MOD_RES (16)..(16): Any L- or D-natural amino acid and any non-natural amino acid; see  specification as filed for detail ed description of substitutions, R-groups  and preferred embodiments
  MOD_RES (18)..(21): Any L- or D-natural or non-natural amino acid, and this range may     encompass 1 or 4 residues; see specification as filed for detailed  description of substitutions, R-groups and preferred emb
  c-term may be amidated
VPLXRTVRXTXISISXQXXXXLNPESKAIKNLLK

SEQ ID NO: 391 - protein, 34 aa, Artificial Sequence
  Description of Artificial Sequence: Synthetic peptide
  MOD_RES (5)..(5): Any L- or D-natural amino acid and any non-natural amino acid; see  specification as filed for detail ed description of substitutions, R-groups  and preferred embodiments
  MOD_RES (9)..(9): Any L- or D-natural amino acid and any non-natural amino acid; see  specification as filed for detail ed description of substitutions, R-groups  and preferred embodiments
  MOD_RES (11)..(11): Any L- or D-natural amino acid and any non-natural amino acid; see  specification as filed for detail ed description of substitutions, R-groups  and preferred embodiments
  MOD_RES (16)..(16): Any L- or D-natural amino acid and any non-natural amino acid; see  specification as filed for detail ed description of substitutions, R-groups  and preferred embodiments
  MOD_RES (18)..(21): Any L- or D-natural or non-natural amino acid, and this range may     encompass 1 or 4 residues; see specification as filed for detailed  description of substitutions, R-groups and preferred emb
  c-term may be amidated
VPLSXTVRXTXISISXQXXXXLNPESKAIKNLLK

SEQ ID NO: 392 - protein, 34 aa, Artificial Sequence
  Description of Artificial Sequence: Synthetic peptide
  MOD_RES (6)..(6): Any L- or D-natural amino acid and any non-natural amino acid; see  specification as filed for detail ed description of substitutions, R-groups  and preferred embodiments
  MOD_RES (9)..(9): Any L- or D-natural amino acid and any non-natural amino acid; see  specification as filed for detail ed description of substitutions, R-groups  and preferred embodiments
  MOD_RES (11)..(11): Any L- or D-natural amino acid and any non-natural amino acid; see  specification as filed for detail ed description of substitutions, R-groups  and preferred embodiments
  MOD_RES (16)..(16): Any L- or D-natural amino acid and any non-natural amino acid; see  specification as filed for detail ed description of substitutions, R-groups  and preferred embodiments
  MOD_RES (18)..(21): Any L- or D-natural or non-natural amino acid, and this range may     encompass 1 or 4 residues; see specification as filed for detailed  description of substitutions, R-groups and preferred emb
  c-term may be amidated
VPLSRXVRXTXISISXQXXXXLNPESKAIKNLLK

SEQ ID NO: 393 - protein, 34 aa, Artificial Sequence
  Description of Artificial Sequence: Synthetic peptide
  MOD_RES (7)..(7): Any L- or D-natural amino acid and any non-natural amino acid; see  specification as filed for detail ed description of substitutions, R-groups  and preferred embodiments
  MOD_RES (9)..(9): Any L- or D-natural amino acid and any non-natural amino acid; see  specification as filed for detail ed description of substitutions, R-groups  and preferred embodiments
  MOD_RES (11)..(11): Any L- or D-natural amino acid and any non-natural amino acid; see  specification as filed for detail ed description of substitutions, R-groups  and preferred embodiments
  MOD_RES (16)..(16): Any L- or D-natural amino acid and any non-natural amino acid; see  specification as filed for detail ed description of substitutions, R-groups  and preferred embodiments
  MOD_RES (18)..(21): Any L- or D-natural or non-natural amino acid, and this range may     encompass 1 or 4 residues; see specification as filed for detailed  description of substitutions, R-groups and preferred emb
  c-term may be amidated
VPLSRTXRXTXISISXQXXXXLNPESKAIKNLLK

SEQ ID NO: 394 - protein, 34 aa, Artificial Sequence
  Description of Artificial Sequence: Synthetic peptide
  MOD_RES (8)..(9): Any L- or D-natural amino acid and any non-natural amino acid; see  specification as filed for detail ed description of substitutions, R-groups  and preferred embodiments
  MOD_RES (11)..(11): Any L- or D-natural amino acid and any non-natural amino acid; see  specification as filed for detail ed description of substitutions, R-groups  and preferred embodiments
  MOD_RES (16)..(16): Any L- or D-natural amino acid and any non-natural amino acid; see  specification as filed for detail ed description of substitutions, R-groups  and preferred embodiments
  MOD_RES (18)..(21): Any L- or D-natural or non-natural amino acid, and this range may     encompass 1 or 4 residues; see specification as filed for detailed  description of substitutions, R-groups and preferred emb
  c-term may be amidated
VPLSRTVXXTXISISXQXXXXLNPESKAIKNLLK

SEQ ID NO: 395 - protein, 34 aa, Artificial Sequence
  Description of Artificial Sequence: Synthetic peptide
  MOD_RES (17)..(17): Any L- or D-natural amino acid and any non-natural amino acid; see  specification as filed for detail ed description of substitutions, R-groups  and preferred embodiments
  MOD_RES (18)..(21): Any L- or D-natural or non-natural amino acid, and this range may     encompass 1 or 4 residues; see specification as filed for detailed  description of substitutions, R-groups and preferred emb
  c-term may be amidated
VPLSRTVRCTCISISQXXXXXLNPESKAIKNLLK

SEQ ID NO: 396 - protein, 34 aa, Artificial Sequence
  Description of Artificial Sequence: Synthetic peptide
  MOD_RES (1)..(1): Any L- or D-natural amino acid and any non-natural amino acid; see  specification as filed for detail ed description of substitutions, R-groups  and preferred embodiments
  MOD_RES (9)..(9): Any L- or D-natural amino acid and any non-natural amino acid; see  specification as filed for detail ed description of substitutions, R-groups  and preferred embodiments
  MOD_RES (11)..(11): Any L- or D-natural amino acid and any non-natural amino acid; see  specification as filed for detail ed description of substitutions, R-groups  and preferred embodiments
  MOD_RES (17)..(17): Any L- or D-natural amino acid and any non-natural amino acid; see  specification as filed for detail ed description of substitutions, R-groups  and preferred embodiments
  MOD_RES (18)..(21): Any L- or D-natural or non-natural amino acid, and this range may     encompass 1 or 4 residues; see specification as filed for detailed  description of substitutions, R-groups and preferred emb
  c-term may be amidated
XPLSRTVRXTXISISQXXXXXLNPESKAIKNLLK

SEQ ID NO: 397 - protein, 34 aa, Artificial Sequence
  Description of Artificial Sequence: Synthetic peptide
  MOD_RES (2)..(2): Any L- or D-natural amino acid and any non-natural amino acid; see  specification as filed for detail ed description of substitutions, R-groups  and preferred embodiments
  MOD_RES (9)..(9): Any L- or D-natural amino acid and any non-natural amino acid; see  specification as filed for detail ed description of substitutions, R-groups  and preferred embodiments
  MOD_RES (11)..(11): Any L- or D-natural amino acid and any non-natural amino acid; see  specification as filed for detail ed description of substitutions, R-groups  and preferred embodiments
  MOD_RES (17)..(17): Any L- or D-natural amino acid and any non-natural amino acid; see  specification as filed for detail ed description of substitutions, R-groups  and preferred embodiments
  MOD_RES (18)..(21): Any L- or D-natural or non-natural amino acid, and this range may     encompass 1 or 4 residues; see specification as filed for detailed  description of substitutions, R-groups and preferred emb
  c-term may be amidated
VXLSRTVRXTXISISQXXXXXLNPESKAIKNLLK

SEQ ID NO: 398 - protein, 34 aa, Artificial Sequence
  Description of Artificial Sequence: Synthetic peptide
  MOD_RES (3)..(3): Any L- or D-natural amino acid and any non-natural amino acid; see  specification as filed for detail ed description of substitutions, R-groups  and preferred embodiments
  MOD_RES (9)..(9): Any L- or D-natural amino acid and any non-natural amino acid; see  specification as filed for detail ed description of substitutions, R-groups  and preferred embodiments
  MOD_RES (11)..(11): Any L- or D-natural amino acid and any non-natural amino acid; see  specification as filed for detail ed description of substitutions, R-groups  and preferred embodiments
  MOD_RES (17)..(17): Any L- or D-natural amino acid and any non-natural amino acid; see  specification as filed for detail ed description of substitutions, R-groups  and preferred embodiments
  MOD_RES (18)..(21): Any L- or D-natural or non-natural amino acid, and this range may     encompass 1 or 4 residues; see specification as filed for detailed  description of substitutions, R-groups and preferred emb
  c-term may be amidated
VPXSRTVRXTXISISQXXXXXLNPESKAIKNLLK

SEQ ID NO: 399 - protein, 34 aa, Artificial Sequence
  Description of Artificial Sequence: Synthetic peptide
  MOD_RES (4)..(4): Any L- or D-natural amino acid and any non-natural amino acid; see  specification as filed for detail ed description of substitutions, R-groups  and preferred embodiments
  MOD_RES (9)..(9): Any L- or D-natural amino acid and any non-natural amino acid; see  specification as filed for detail ed description of substitutions, R-groups  and preferred embodiments
  MOD_RES (11)..(11): Any L- or D-natural amino acid and any non-natural amino acid; see  specification as filed for detail ed description of substitutions, R-groups  and preferred embodiments
  MOD_RES (17)..(17): Any L- or D-natural amino acid and any non-natural amino acid; see  specification as filed for detail ed description of substitutions, R-groups  and preferred embodiments
  MOD_RES (18)..(21): Any L- or D-natural or non-natural amino acid, and this range may     encompass 1 or 4 residues; see specification as filed for detailed  description of substitutions, R-groups and preferred emb
  c-term may be amidated
VPLXRTVRXTXISISQXXXXXLNPESKAIKNLLK

SEQ ID NO: 400 - protein, 34 aa, Artificial Sequence
  Description of Artificial Sequence: Synthetic peptide
  MOD_RES (5)..(5): Any L- or D-natural amino acid and any non-natural amino acid; see  specification as filed for detail ed description of substitutions, R-groups  and preferred embodiments
  MOD_RES (9)..(9): Any L- or D-natural amino acid and any non-natural amino acid; see  specification as filed for detail ed description of substitutions, R-groups  and preferred embodiments
  MOD_RES (11)..(11): Any L- or D-natural amino acid and any non-natural amino acid; see  specification as filed for detail ed description of substitutions, R-groups  and preferred embodiments
  MOD_RES (17)..(17): Any L- or D-natural amino acid and any non-natural amino acid; see  specification as filed for detail ed description of substitutions, R-groups  and preferred embodiments
  MOD_RES (18)..(21): Any L- or D-natural or non-natural amino acid, and this range may     encompass 1 or 4 residues; see specification as filed for detailed  description of substitutions, R-groups and preferred emb
  c-term may be amidated
VPLSXTVRXTXISISQXXXXXLNPESKAIKNLLK

SEQ ID NO: 401 - protein, 34 aa, Artificial Sequence
  Description of Artificial Sequence: Synthetic peptide
  MOD_RES (6)..(6): Any L- or D-natural amino acid and any non-natural amino acid; see  specification as filed for detail ed description of substitutions, R-groups  and preferred embodiments
  MOD_RES (9)..(9): Any L- or D-natural amino acid and any non-natural amino acid; see  specification as filed for detail ed description of substitutions, R-groups  and preferred embodiments
  MOD_RES (11)..(11): Any L- or D-natural amino acid and any non-natural amino acid; see  specification as filed for detail ed description of substitutions, R-groups  and preferred embodiments
  MOD_RES (17)..(17): Any L- or D-natural amino acid and any non-natural amino acid; see  specification as filed for detail ed description of substitutions, R-groups  and preferred embodiments
  MOD_RES (18)..(21): Any L- or D-natural or non-natural amino acid, and this range may     encompass 1 or 4 residues; see specification as filed for detailed  description of substitutions, R-groups and preferred emb
  c-term may be amidated
VPLSRXVRXTXISISQXXXXXLNPESKAIKNLLK

SEQ ID NO: 402 - protein, 34 aa, Artificial Sequence
  Description of Artificial Sequence: Synthetic peptide
  MOD_RES (7)..(7): Any L- or D-natural amino acid and any non-natural amino acid; see  specification as filed for detail ed description of substitutions, R-groups  and preferred embodiments
  MOD_RES (9)..(9): Any L- or D-natural amino acid and any non-natural amino acid; see  specification as filed for detail ed description of substitutions, R-groups  and preferred embodiments
  MOD_RES (11)..(11): Any L- or D-natural amino acid and any non-natural amino acid; see  specification as filed for detail ed description of substitutions, R-groups  and preferred embodiments
  MOD_RES (17)..(17): Any L- or D-natural amino acid and any non-natural amino acid; see  specification as filed for detail ed description of substitutions, R-groups  and preferred embodiments
  MOD_RES (18)..(21): Any L- or D-natural or non-natural amino acid, and this range may     encompass 1 or 4 residues; see specification as filed for detailed  description of substitutions, R-groups and preferred emb
  c-term may be amidated
VPLSRTXRXTXISISQXXXXXLNPESKAIKNLLK

SEQ ID NO: 403 - protein, 34 aa, Artificial Sequence
  Description of Artificial Sequence: Synthetic peptide
  MOD_RES (8)..(9): Any L- or D-natural amino acid and any non-natural amino acid; see  specification as filed for detail ed description of substitutions, R-groups  and preferred embodiments
  MOD_RES (11)..(11): Any L- or D-natural amino acid and any non-natural amino acid; see  specification as filed for detail ed description of substitutions, R-groups  and preferred embodiments
  MOD_RES (17)..(17): Any L- or D-natural amino acid and any non-natural amino acid; see  specification as filed for detail ed description of substitutions, R-groups  and preferred embodiments
  MOD_RES (18)..(21): Any L- or D-natural or non-natural amino acid, and this range may     encompass 1 or 4 residues; see specification as filed for detailed  description of substitutions, R-groups and preferred emb
  c-term may be amidated
VPLSRTVXXTXISISQXXXXXLNPESKAIKNLLK

SEQ ID NO: 404 - protein, 34 aa, Artificial Sequence
  Description of Artificial Sequence: Synthetic peptide
  MOD_RES (18)..(21): Any L- or D-natural or non-natural amino acid, and this range may     encompass 1 or 4 residues; see specification as filed for detailed  description of substitutions, R-groups and preferred emb
  c-term may be amidated
VPLSRTVRCTCISISNQXXXXKAIKNLLKAVSKE

SEQ ID NO: 405 - protein, 34 aa, Artificial Sequence
  Description of Artificial Sequence: Synthetic peptide
  MOD_RES (1)..(1): Any L- or D-natural amino acid and any non-natural amino acid; see  specification as filed for detail ed description of substitutions, R-groups  and preferred embodiments
  MOD_RES (9)..(9): Any L- or D-natural amino acid and any non-natural amino acid; see  specification as filed for detail ed description of substitutions, R-groups  and preferred embodiments
  MOD_RES (11)..(11): Any L- or D-natural amino acid and any non-natural amino acid; see  specification as filed for detail ed description of substitutions, R-groups  and preferred embodiments
  MOD_RES (18)..(21): Any L- or D-natural or non-natural amino acid, and this range may     encompass 1 or 4 residues; see specification as filed for detailed  description of substitutions, R-groups and preferred emb
  c-term may be amidated
XPLSRTVRXTXISISNQXXXXKAIKNLLKAVSKE

SEQ ID NO: 406 - protein, 34 aa, Artificial Sequence
  Description of Artificial Sequence: Synthetic peptide
  MOD_RES (2)..(2): Any L- or D-natural amino acid and any non-natural amino acid; see  specification as filed for detail ed description of substitutions, R-groups  and preferred embodiments
  MOD_RES (9)..(9): Any L- or D-natural amino acid and any non-natural amino acid; see  specification as filed for detail ed description of substitutions, R-groups  and preferred embodiments
  MOD_RES (11)..(11): Any L- or D-natural amino acid and any non-natural amino acid; see  specification as filed for detail ed description of substitutions, R-groups  and preferred embodiments
  MOD_RES (18)..(21): Any L- or D-natural or non-natural amino acid, and this range may     encompass 1 or 4 residues; see specification as filed for detailed  description of substitutions, R-groups and preferred emb
  c-term may be amidated
VXLSRTVRXTXISISNQXXXXKAIKNLLKAVSKE

SEQ ID NO: 407 - protein, 34 aa, Artificial Sequence
  Description of Artificial Sequence: Synthetic peptide
  MOD_RES (3)..(3): Any L- or D-natural amino acid and any non-natural amino acid; see  specification as filed for detail ed description of substitutions, R-groups  and preferred embodiments
  MOD_RES (9)..(9): Any L- or D-natural amino acid and any non-natural amino acid; see  specification as filed for detail ed description of substitutions, R-groups  and preferred embodiments
  MOD_RES (11)..(11): Any L- or D-natural amino acid and any non-natural amino acid; see  specification as filed for detail ed description of substitutions, R-groups  and preferred embodiments
  MOD_RES (18)..(21): Any L- or D-natural or non-natural amino acid, and this range may     encompass 1 or 4 residues; see specification as filed for detailed  description of substitutions, R-groups and preferred emb
  c-term may be amidated
VPXSRTVRXTXISISNQXXXXKAIKNLLKAVSKE

SEQ ID NO: 408 - protein, 34 aa, Artificial Sequence
  Description of Artificial Sequence: Synthetic peptide
  MOD_RES (4)..(4): Any L- or D-natural amino acid and any non-natural amino acid; see  specification as filed for detail ed description of substitutions, R-groups  and preferred embodiments
  MOD_RES (9)..(9): Any L- or D-natural amino acid and any non-natural amino acid; see  specification as filed for detail ed description of substitutions, R-groups  and preferred embodiments
  MOD_RES (11)..(11): Any L- or D-natural amino acid and any non-natural amino acid; see  specification as filed for detail ed description of substitutions, R-groups  and preferred embodiments
  MOD_RES (18)..(21): Any L- or D-natural or non-natural amino acid, and this range may     encompass 1 or 4 residues; see specification as filed for detailed  description of substitutions, R-groups and preferred emb
  c-term may be amidated
VPLXRTVRXTXISISNQXXXXKAIKNLLKAVSKE

SEQ ID NO: 409 - protein, 34 aa, Artificial Sequence
  Description of Artificial Sequence: Synthetic peptide
  MOD_RES (5)..(5): Any L- or D-natural amino acid and any non-natural amino acid; see  specification as filed for detail ed description of substitutions, R-groups  and preferred embodiments
  MOD_RES (9)..(9): Any L- or D-natural amino acid and any non-natural amino acid; see  specification as filed for detail ed description of substitutions, R-groups  and preferred embodiments
  MOD_RES (11)..(11): Any L- or D-natural amino acid and any non-natural amino acid; see  specification as filed for detail ed description of substitutions, R-groups  and preferred embodiments
  MOD_RES (18)..(21): Any L- or D-natural or non-natural amino acid, and this range may     encompass 1 or 4 residues; see specification as filed for detailed  description of substitutions, R-groups and preferred emb
  c-term may be amidated
VPLSXTVRXTXISISNQXXXXKAIKNLLKAVSKE

SEQ ID NO: 410 - protein, 34 aa, Artificial Sequence
  Description of Artificial Sequence: Synthetic peptide
  MOD_RES (6)..(6): Any L- or D-natural amino acid and any non-natural amino acid; see  specification as filed for detail ed description of substitutions, R-groups  and preferred embodiments
  MOD_RES (9)..(9): Any L- or D-natural amino acid and any non-natural amino acid; see  specification as filed for detail ed description of substitutions, R-groups  and preferred embodiments
  MOD_RES (11)..(11): Any L- or D-natural amino acid and any non-natural amino acid; see  specification as filed for detail ed description of substitutions, R-groups  and preferred embodiments
  MOD_RES (18)..(21): Any L- or D-natural or non-natural amino acid, and this range may     encompass 1 or 4 residues; see specification as filed for detailed  description of substitutions, R-groups and preferred emb
  c-term may be amidated
VPLSRXVRXTXISISNQXXXXKAIKNLLKAVSKE

SEQ ID NO: 411 - protein, 34 aa, Artificial Sequence
  Description of Artificial Sequence: Synthetic peptide
  MOD_RES (7)..(7): Any L- or D-natural amino acid and any non-natural amino acid; see  specification as filed for detail ed description of substitutions, R-groups  and preferred embodiments
  MOD_RES (9)..(9): Any L- or D-natural amino acid and any non-natural amino acid; see  specification as filed for detail ed description of substitutions, R-groups  and preferred embodiments
  MOD_RES (11)..(11): Any L- or D-natural amino acid and any non-natural amino acid; see  specification as filed for detail ed description of substitutions, R-groups  and preferred embodiments
  MOD_RES (18)..(21): Any L- or D-natural or non-natural amino acid, and this range may     encompass 1 or 4 residues; see specification as filed for detailed  description of substitutions, R-groups and preferred emb
  c-term may be amidated
VPLSRTXRXTXISISNQXXXXKAIKNLLKAVSKE

SEQ ID NO: 412 - protein, 34 aa, Artificial Sequence
  Description of Artificial Sequence: Synthetic peptide
  MOD_RES (8)..(9): Any L- or D-natural amino acid and any non-natural amino acid; see  specification as filed for detail ed description of substitutions, R-groups  and preferred embodiments
  MOD_RES (11)..(11): Any L- or D-natural amino acid and any non-natural amino acid; see  specification as filed for detail ed description of substitutions, R-groups  and preferred embodiments
  MOD_RES (18)..(21): Any L- or D-natural or non-natural amino acid, and this range may     encompass 1 or 4 residues; see specification as filed for detailed  description of substitutions, R-groups and preferred emb
  c-term may be amidated
VPLSRTVXXTXISISNQXXXXKAIKNLLKAVSKE

SEQ ID NO: 413 - protein, 34 aa, Artificial Sequence
  Description of Artificial Sequence: Synthetic peptide
  MOD_RES (12)..(12): Any L- or D-natural amino acid and any non-natural amino acid; see  specification as filed for detail ed description of substitutions, R-groups  and preferred embodiments
  MOD_RES (18)..(21): Any L- or D-natural or non-natural amino acid, and this range may     encompass 1 or 4 residues; see specification as filed for detailed  description of substitutions, R-groups and preferred emb
  c-term may be amidated
VPLSRTVRCTCXSISNQXXXXKAIKNLLKAVSKE

SEQ ID NO: 414 - protein, 34 aa, Artificial Sequence
  Description of Artificial Sequence: Synthetic peptide
  MOD_RES (1)..(1): Any L- or D-natural amino acid and any non-natural amino acid; see  specification as filed for detail ed description of substitutions, R-groups  and preferred embodiments
  MOD_RES (9)..(9): Any L- or D-natural amino acid and any non-natural amino acid; see  specification as filed for detail ed description of substitutions, R-groups  and preferred embodiments
  MOD_RES (11)..(12): Any L- or D-natural amino acid and any non-natural amino acid; see  specification as filed for detail ed description of substitutions, R-groups  and preferred embodiments
  MOD_RES (18)..(21): Any L- or D-natural or non-natural amino acid, and this range may     encompass 1 or 4 residues; see specification as filed for detailed  description of substitutions, R-groups and preferred emb
  c-term may be amidated
XPLSRTVRXTXXSISNQXXXXKAIKNLLKAVSKE

SEQ ID NO: 415 - protein, 34 aa, Artificial Sequence
  Description of Artificial Sequence: Synthetic peptide
  MOD_RES (2)..(2): Any L- or D-natural amino acid and any non-natural amino acid; see  specification as filed for detail ed description of substitutions, R-groups  and preferred embodiments
  MOD_RES (9)..(9): Any L- or D-natural amino acid and any non-natural amino acid; see  specification as filed for detail ed description of substitutions, R-groups  and preferred embodiments
  MOD_RES (11)..(12): Any L- or D-natural amino acid and any non-natural amino acid; see  specification as filed for detail ed description of substitutions, R-groups  and preferred embodiments
  MOD_RES (18)..(21): Any L- or D-natural or non-natural amino acid, and this range may     encompass 1 or 4 residues; see specification as filed for detailed  description of substitutions, R-groups and preferred emb
  c-term may be amidated
VXLSRTVRXTXXSISNQXXXXKAIKNLLKAVSKE

SEQ ID NO: 416 - protein, 34 aa, Artificial Sequence
  Description of Artificial Sequence: Synthetic peptide
  MOD_RES (3)..(3): Any L- or D-natural amino acid and any non-natural amino acid; see  specification as filed for detail ed description of substitutions, R-groups  and preferred embodiments
  MOD_RES (9)..(9): Any L- or D-natural amino acid and any non-natural amino acid; see  specification as filed for detail ed description of substitutions, R-groups  and preferred embodiments
  MOD_RES (11)..(12): Any L- or D-natural amino acid and any non-natural amino acid; see  specification as filed for detail ed description of substitutions, R-groups  and preferred embodiments
  MOD_RES (18)..(21): Any L- or D-natural or non-natural amino acid, and this range may     encompass 1 or 4 residues; see specification as filed for detailed  description of substitutions, R-groups and preferred emb
  c-term may be amidated
VPXSRTVRXTXXSISNQXXXXKAIKNLLKAVSKE

SEQ ID NO: 417 - protein, 34 aa, Artificial Sequence
  Description of Artificial Sequence: Synthetic peptide
  MOD_RES (4)..(4): Any L- or D-natural amino acid and any non-natural amino acid; see  specification as filed for detail ed description of substitutions, R-groups  and preferred embodiments
  MOD_RES (9)..(9): Any L- or D-natural amino acid and any non-natural amino acid; see  specification as filed for detail ed description of substitutions, R-groups  and preferred embodiments
  MOD_RES (11)..(12): Any L- or D-natural amino acid and any non-natural amino acid; see  specification as filed for detail ed description of substitutions, R-groups  and preferred embodiments
  MOD_RES (18)..(21): Any L- or D-natural or non-natural amino acid, and this range may     encompass 1 or 4 residues; see specification as filed for detailed  description of substitutions, R-groups and preferred emb
  c-term may be amidated
VPLXRTVRXTXXSISNQXXXXKAIKNLLKAVSKE

SEQ ID NO: 418 - protein, 34 aa, Artificial Sequence
  Description of Artificial Sequence: Synthetic peptide
  MOD_RES (5)..(5): Any L- or D-natural amino acid and any non-natural amino acid; see  specification as filed for detail ed description of substitutions, R-groups  and preferred embodiments
  MOD_RES (9)..(9): Any L- or D-natural amino acid and any non-natural amino acid; see  specification as filed for detail ed description of substitutions, R-groups  and preferred embodiments
  MOD_RES (11)..(12): Any L- or D-natural amino acid and any non-natural amino acid; see  specification as filed for detail ed description of substitutions, R-groups  and preferred embodiments
  MOD_RES (18)..(21): Any L- or D-natural or non-natural amino acid, and this range may     encompass 1 or 4 residues; see specification as filed for detailed  description of substitutions, R-groups and preferred emb
  c-term may be amidated
VPLSXTVRXTXXSISNQXXXXKAIKNLLKAVSKE

SEQ ID NO: 419 - protein, 34 aa, Artificial Sequence
  Description of Artificial Sequence: Synthetic peptide
  MOD_RES (6)..(6): Any L- or D-natural amino acid and any non-natural amino acid; see  specification as filed for detail ed description of substitutions, R-groups  and preferred embodiments
  MOD_RES (9)..(9): Any L- or D-natural amino acid and any non-natural amino acid; see  specification as filed for detail ed description of substitutions, R-groups  and preferred embodiments
  MOD_RES (11)..(12): Any L- or D-natural amino acid and any non-natural amino acid; see  specification as filed for detail ed description of substitutions, R-groups  and preferred embodiments
  MOD_RES (18)..(21): Any L- or D-natural or non-natural amino acid, and this range may     encompass 1 or 4 residues; see specification as filed for detailed  description of substitutions, R-groups and preferred emb
  c-term may be amidated
VPLSRXVRXTXXSISNQXXXXKAIKNLLKAVSKE

SEQ ID NO: 420 - protein, 34 aa, Artificial Sequence
  Description of Artificial Sequence: Synthetic peptide
  MOD_RES (7)..(7): Any L- or D-natural amino acid and any non-natural amino acid; see  specification as filed for detail ed description of substitutions, R-groups  and preferred embodiments
  MOD_RES (9)..(9): Any L- or D-natural amino acid and any non-natural amino acid; see  specification as filed for detail ed description of substitutions, R-groups  and preferred embodiments
  MOD_RES (11)..(12): Any L- or D-natural amino acid and any non-natural amino acid; see  specification as filed for detail ed description of substitutions, R-groups  and preferred embodiments
  MOD_RES (18)..(21): Any L- or D-natural or non-natural amino acid, and this range may     encompass 1 or 4 residues; see specification as filed for detailed  description of substitutions, R-groups and preferred emb
  c-term may be amidated
VPLSRTXRXTXXSISNQXXXXKAIKNLLKAVSKE

SEQ ID NO: 421 - protein, 34 aa, Artificial Sequence
  Description of Artificial Sequence: Synthetic peptide
  MOD_RES (8)..(9): Any L- or D-natural amino acid and any non-natural amino acid; see  specification as filed for detail ed description of substitutions, R-groups  and preferred embodiments
  MOD_RES (11)..(12): Any L- or D-natural amino acid and any non-natural amino acid; see  specification as filed for detail ed description of substitutions, R-groups  and preferred embodiments
  MOD_RES (18)..(21): Any L- or D-natural or non-natural amino acid, and this range may     encompass 1 or 4 residues; see specification as filed for detailed  description of substitutions, R-groups and preferred emb
  c-term may be amidated
VPLSRTVXXTXXSISNQXXXXKAIKNLLKAVSKE

SEQ ID NO: 422 - protein, 34 aa, Artificial Sequence
  Description of Artificial Sequence: Synthetic peptide
  MOD_RES (13)..(13): Any L- or D-natural amino acid and any non-natural amino acid; see  specification as filed for detail ed description of substitutions, R-groups  and preferred embodiments
  MOD_RES (18)..(21): Any L- or D-natural or non-natural amino acid, and this range may     encompass 1 or 4 residues; see specification as filed for detailed  description of substitutions, R-groups and preferred emb
  c-term may be amidated
VPLSRTVRCTCIXISNQXXXXKAIKNLLKAVSKE

SEQ ID NO: 423 - protein, 34 aa, Artificial Sequence
  Description of Artificial Sequence: Synthetic peptide
  MOD_RES (1)..(1): Any L- or D-natural amino acid and any non-natural amino acid; see  specification as filed for detail ed description of substitutions, R-groups  and preferred embodiments
  MOD_RES (9)..(9): Any L- or D-natural amino acid and any non-natural amino acid; see  specification as filed for detail ed description of substitutions, R-groups  and preferred embodiments
  MOD_RES (11)..(11): Any L- or D-natural amino acid and any non-natural amino acid; see  specification as filed for detail ed description of substitutions, R-groups  and preferred embodiments
  MOD_RES (13)..(13): Any L- or D-natural amino acid and any non-natural amino acid; see  specification as filed for detail ed description of substitutions, R-groups  and preferred embodiments
  MOD_RES (18)..(21): Any L- or D-natural or non-natural amino acid, and this range may     encompass 1 or 4 residues; see specification as filed for detailed  description of substitutions, R-groups and preferred emb
  c-term may be amidated
XPLSRTVRXTXIXISNQXXXXKAIKNLLKAVSKE

SEQ ID NO: 424 - protein, 34 aa, Artificial Sequence
  Description of Artificial Sequence: Synthetic peptide
  MOD_RES (2)..(2): Any L- or D-natural amino acid and any non-natural amino acid; see  specification as filed for detail ed description of substitutions, R-groups  and preferred embodiments
  MOD_RES (9)..(9): Any L- or D-natural amino acid and any non-natural amino acid; see  specification as filed for detail ed description of substitutions, R-groups  and preferred embodiments
  MOD_RES (11)..(11): Any L- or D-natural amino acid and any non-natural amino acid; see  specification as filed for detail ed description of substitutions, R-groups  and preferred embodiments
  MOD_RES (13)..(13): Any L- or D-natural amino acid and any non-natural amino acid; see  specification as filed for detail ed description of substitutions, R-groups  and preferred embodiments
  MOD_RES (18)..(21): Any L- or D-natural or non-natural amino acid, and this range may     encompass 1 or 4 residues; see specification as filed for detailed  description of substitutions, R-groups and preferred emb
  c-term may be amidated
VXLSRTVRXTXIXISNQXXXXKAIKNLLKAVSKE

SEQ ID NO: 425 - protein, 34 aa, Artificial Sequence
  Description of Artificial Sequence: Synthetic peptide
  MOD_RES (3)..(3): Any L- or D-natural amino acid and any non-natural amino acid; see  specification as filed for detail ed description of substitutions, R-groups  and preferred embodiments
  MOD_RES (9)..(9): Any L- or D-natural amino acid and any non-natural amino acid; see  specification as filed for detail ed description of substitutions, R-groups  and preferred embodiments
  MOD_RES (11)..(11): Any L- or D-natural amino acid and any non-natural amino acid; see  specification as filed for detail ed description of substitutions, R-groups  and preferred embodiments
  MOD_RES (13)..(13): Any L- or D-natural amino acid and any non-natural amino acid; see  specification as filed for detail ed description of substitutions, R-groups  and preferred embodiments
  MOD_RES (18)..(21): Any L- or D-natural or non-natural amino acid, and this range may     encompass 1 or 4 residues; see specification as filed for detailed  description of substitutions, R-groups and preferred emb
  c-term may be amidated
VPXSRTVRXTXIXISNQXXXXKAIKNLLKAVSKE

SEQ ID NO: 426 - protein, 34 aa, Artificial Sequence
  Description of Artificial Sequence: Synthetic peptide
  MOD_RES (4)..(4): Any L- or D-natural amino acid and any non-natural amino acid; see  specification as filed for detail ed description of substitutions, R-groups  and preferred embodiments
  MOD_RES (9)..(9): Any L- or D-natural amino acid and any non-natural amino acid; see  specification as filed for detail ed description of substitutions, R-groups  and preferred embodiments
  MOD_RES (11)..(11): Any L- or D-natural amino acid and any non-natural amino acid; see  specification as filed for detail ed description of substitutions, R-groups  and preferred embodiments
  MOD_RES (13)..(13): Any L- or D-natural amino acid and any non-natural amino acid; see  specification as filed for detail ed description of substitutions, R-groups  and preferred embodiments
  MOD_RES (18)..(21): Any L- or D-natural or non-natural amino acid, and this range may     encompass 1 or 4 residues; see specification as filed for detailed  description of substitutions, R-groups and preferred emb
  c-term may be amidated
VPLXRTVRXTXIXISNQXXXXKAIKNLLKAVSKE

SEQ ID NO: 427 - protein, 34 aa, Artificial Sequence
  Description of Artificial Sequence: Synthetic peptide
  MOD_RES (5)..(5): Any L- or D-natural amino acid and any non-natural amino acid; see  specification as filed for detail ed description of substitutions, R-groups  and preferred embodiments
  MOD_RES (9)..(9): Any L- or D-natural amino acid and any non-natural amino acid; see  specification as filed for detail ed description of substitutions, R-groups  and preferred embodiments
  MOD_RES (11)..(11): Any L- or D-natural amino acid and any non-natural amino acid; see  specification as filed for detail ed description of substitutions, R-groups  and preferred embodiments
  MOD_RES (13)..(13): Any L- or D-natural amino acid and any non-natural amino acid; see  specification as filed for detail ed description of substitutions, R-groups  and preferred embodiments
  MOD_RES (18)..(21): Any L- or D-natural or non-natural amino acid, and this range may     encompass 1 or 4 residues; see specification as filed for detailed  description of substitutions, R-groups and preferred emb
  c-term may be amidated
VPLSXTVRXTXIXISNQXXXXKAIKNLLKAVSKE

SEQ ID NO: 428 - protein, 34 aa, Artificial Sequence
  Description of Artificial Sequence: Synthetic peptide
  MOD_RES (6)..(6): Any L- or D-natural amino acid and any non-natural amino acid; see  specification as filed for detail ed description of substitutions, R-groups  and preferred embodiments
  MOD_RES (9)..(9): Any L- or D-natural amino acid and any non-natural amino acid; see  specification as filed for detail ed description of substitutions, R-groups  and preferred embodiments
  MOD_RES (11)..(11): Any L- or D-natural amino acid and any non-natural amino acid; see  specification as filed for detail ed description of substitutions, R-groups  and preferred embodiments
  MOD_RES (13)..(13): Any L- or D-natural amino acid and any non-natural amino acid; see  specification as filed for detail ed description of substitutions, R-groups  and preferred embodiments
  MOD_RES (18)..(21): Any L- or D-natural or non-natural amino acid, and this range may     encompass 1 or 4 residues; see specification as filed for detailed  description of substitutions, R-groups and preferred emb
  c-term may be amidated
VPLSRXVRXTXIXISNQXXXXKAIKNLLKAVSKE

SEQ ID NO: 429 - protein, 34 aa, Artificial Sequence
  Description of Artificial Sequence: Synthetic peptide
  MOD_RES (7)..(7): Any L- or D-natural amino acid and any non-natural amino acid; see  specification as filed for detail ed description of substitutions, R-groups  and preferred embodiments
  MOD_RES (9)..(9): Any L- or D-natural amino acid and any non-natural amino acid; see  specification as filed for detail ed description of substitutions, R-groups  and preferred embodiments
  MOD_RES (11)..(11): Any L- or D-natural amino acid and any non-natural amino acid; see  specification as filed for detail ed description of substitutions, R-groups  and preferred embodiments
  MOD_RES (13)..(13): Any L- or D-natural amino acid and any non-natural amino acid; see  specification as filed for detail ed description of substitutions, R-groups  and preferred embodiments
  MOD_RES (18)..(21): Any L- or D-natural or non-natural amino acid, and this range may     encompass 1 or 4 residues; see specification as filed for detailed  description of substitutions, R-groups and preferred emb
  c-term may be amidated
VPLSRTXRXTXIXISNQXXXXKAIKNLLKAVSKE

SEQ ID NO: 430 - protein, 34 aa, Artificial Sequence
  Description of Artificial Sequence: Synthetic peptide
  MOD_RES (8)..(9): Any L- or D-natural amino acid and any non-natural amino acid; see  specification as filed for detail ed description of substitutions, R-groups  and preferred embodiments
  MOD_RES (11)..(11): Any L- or D-natural amino acid and any non-natural amino acid; see  specification as filed for detail ed description of substitutions, R-groups  and preferred embodiments
  MOD_RES (13)..(13): Any L- or D-natural amino acid and any non-natural amino acid; see  specification as filed for detail ed description of substitutions, R-groups  and preferred embodiments
  MOD_RES (18)..(21): Any L- or D-natural or non-natural amino acid, and this range may     encompass 1 or 4 residues; see specification as filed for detailed  description of substitutions, R-groups and preferred emb
  c-term may be amidated
VPLSRTVXXTXIXISNQXXXXKAIKNLLKAVSKE

SEQ ID NO: 431 - protein, 34 aa, Artificial Sequence
  Description of Artificial Sequence: Synthetic peptide
  MOD_RES (14)..(14): Any L- or D-natural amino acid and any non-natural amino acid; see  specification as filed for detail ed description of substitutions, R-groups  and preferred embodiments
  MOD_RES (18)..(21): Any L- or D-natural or non-natural amino acid, and this range may     encompass 1 or 4 residues; see specification as filed for detailed  description of substitutions, R-groups and preferred emb
  c-term may be amidated
VPLSRTVRCTCISXSNQXXXXKAIKNLLKAVSKE

SEQ ID NO: 432 - protein, 34 aa, Artificial Sequence
  Description of Artificial Sequence: Synthetic peptide
  MOD_RES (1)..(1): Any L- or D-natural amino acid and any non-natural amino acid; see  specification as filed for detail ed description of substitutions, R-groups  and preferred embodiments
  MOD_RES (9)..(9): Any L- or D-natural amino acid and any non-natural amino acid; see  specification as filed for detail ed description of substitutions, R-groups  and preferred embodiments
  MOD_RES (11)..(11): Any L- or D-natural amino acid and any non-natural amino acid; see  specification as filed for detail ed description of substitutions, R-groups  and preferred embodiments
  MOD_RES (14)..(14): Any L- or D-natural amino acid and any non-natural amino acid; see  specification as filed for detail ed description of substitutions, R-groups  and preferred embodiments
  MOD_RES (18)..(21): Any L- or D-natural or non-natural amino acid, and this range may     encompass 1 or 4 residues; see specification as filed for detailed  description of substitutions, R-groups and preferred emb
  c-term may be amidated
XPLSRTVRXTXISXSNQXXXXKAIKNLLKAVSKE

SEQ ID NO: 433 - protein, 34 aa, Artificial Sequence
  Description of Artificial Sequence: Synthetic peptide
  MOD_RES (2)..(2): Any L- or D-natural amino acid and any non-natural amino acid; see  specification as filed for detail ed description of substitutions, R-groups  and preferred embodiments
  MOD_RES (9)..(9): Any L- or D-natural amino acid and any non-natural amino acid; see  specification as filed for detail ed description of substitutions, R-groups  and preferred embodiments
  MOD_RES (11)..(11): Any L- or D-natural amino acid and any non-natural amino acid; see  specification as filed for detail ed description of substitutions, R-groups  and preferred embodiments
  MOD_RES (14)..(14): Any L- or D-natural amino acid and any non-natural amino acid; see  specification as filed for detail ed description of substitutions, R-groups  and preferred embodiments
  MOD_RES (18)..(21): Any L- or D-natural or non-natural amino acid, and this range may     encompass 1 or 4 residues; see specification as filed for detailed  description of substitutions, R-groups and preferred emb
  c-term may be amidated
VXLSRTVRXTXISXSNQXXXXKAIKNLLKAVSKE

SEQ ID NO: 434 - protein, 34 aa, Artificial Sequence
  Description of Artificial Sequence: Synthetic peptide
  MOD_RES (3)..(3): Any L- or D-natural amino acid and any non-natural amino acid; see  specification as filed for detail ed description of substitutions, R-groups  and preferred embodiments
  MOD_RES (9)..(9): Any L- or D-natural amino acid and any non-natural amino acid; see  specification as filed for detail ed description of substitutions, R-groups  and preferred embodiments
  MOD_RES (11)..(11): Any L- or D-natural amino acid and any non-natural amino acid; see  specification as filed for detail ed description of substitutions, R-groups  and preferred embodiments
  MOD_RES (14)..(14): Any L- or D-natural amino acid and any non-natural amino acid; see  specification as filed for detail ed description of substitutions, R-groups  and preferred embodiments
  MOD_RES (18)..(21): Any L- or D-natural or non-natural amino acid, and this range may     encompass 1 or 4 residues; see specification as filed for detailed  description of substitutions, R-groups and preferred emb
  c-term may be amidated
VPXSRTVRXTXISXSNQXXXXKAIKNLLKAVSKE

SEQ ID NO: 435 - protein, 34 aa, Artificial Sequence
  Description of Artificial Sequence: Synthetic peptide
  MOD_RES (4)..(4): Any L- or D-natural amino acid and any non-natural amino acid; see  specification as filed for detail ed description of substitutions, R-groups  and preferred embodiments
  MOD_RES (9)..(9): Any L- or D-natural amino acid and any non-natural amino acid; see  specification as filed for detail ed description of substitutions, R-groups  and preferred embodiments
  MOD_RES (11)..(11): Any L- or D-natural amino acid and any non-natural amino acid; see  specification as filed for detail ed description of substitutions, R-groups  and preferred embodiments
  MOD_RES (14)..(14): Any L- or D-natural amino acid and any non-natural amino acid; see  specification as filed for detail ed description of substitutions, R-groups  and preferred embodiments
  MOD_RES (18)..(21): Any L- or D-natural or non-natural amino acid, and this range may     encompass 1 or 4 residues; see specification as filed for detailed  description of substitutions, R-groups and preferred emb
  c-term may be amidated
VPLXRTVRXTXISXSNQXXXXKAIKNLLKAVSKE

SEQ ID NO: 436 - protein, 34 aa, Artificial Sequence
  Description of Artificial Sequence: Synthetic peptide
  MOD_RES (5)..(5): Any L- or D-natural amino acid and any non-natural amino acid; see  specification as filed for detail ed description of substitutions, R-groups  and preferred embodiments
  MOD_RES (9)..(9): Any L- or D-natural amino acid and any non-natural amino acid; see  specification as filed for detail ed description of substitutions, R-groups  and preferred embodiments
  MOD_RES (11)..(11): Any L- or D-natural amino acid and any non-natural amino acid; see  specification as filed for detail ed description of substitutions, R-groups  and preferred embodiments
  MOD_RES (14)..(14): Any L- or D-natural amino acid and any non-natural amino acid; see  specification as filed for detail ed description of substitutions, R-groups  and preferred embodiments
  MOD_RES (18)..(21): Any L- or D-natural or non-natural amino acid, and this range may     encompass 1 or 4 residues; see specification as filed for detailed  description of substitutions, R-groups and preferred emb
  c-term may be amidated
VPLSXTVRXTXISXSNQXXXXKAIKNLLKAVSKE

SEQ ID NO: 437 - protein, 34 aa, Artificial Sequence
  Description of Artificial Sequence: Synthetic peptide
  MOD_RES (6)..(6): Any L- or D-natural amino acid and any non-natural amino acid; see  specification as filed for detail ed description of substitutions, R-groups  and preferred embodiments
  MOD_RES (9)..(9): Any L- or D-natural amino acid and any non-natural amino acid; see  specification as filed for detail ed description of substitutions, R-groups  and preferred embodiments
  MOD_RES (11)..(11): Any L- or D-natural amino acid and any non-natural amino acid; see  specification as filed for detail ed description of substitutions, R-groups  and preferred embodiments
  MOD_RES (14)..(14): Any L- or D-natural amino acid and any non-natural amino acid; see  specification as filed for detail ed description of substitutions, R-groups  and preferred embodiments
  MOD_RES (18)..(21): Any L- or D-natural or non-natural amino acid, and this range may     encompass 1 or 4 residues; see specification as filed for detailed  description of substitutions, R-groups and preferred emb
  c-term may be amidated
VPLSRXVRXTXISXSNQXXXXKAIKNLLKAVSKE

SEQ ID NO: 438 - protein, 34 aa, Artificial Sequence
  Description of Artificial Sequence: Synthetic peptide
  MOD_RES (7)..(7): Any L- or D-natural amino acid and any non-natural amino acid; see  specification as filed for detail ed description of substitutions, R-groups  and preferred embodiments
  MOD_RES (9)..(9): Any L- or D-natural amino acid and any non-natural amino acid; see  specification as filed for detail ed description of substitutions, R-groups  and preferred embodiments
  MOD_RES (11)..(11): Any L- or D-natural amino acid and any non-natural amino acid; see  specification as filed for detail ed description of substitutions, R-groups  and preferred embodiments
  MOD_RES (14)..(14): Any L- or D-natural amino acid and any non-natural amino acid; see  specification as filed for detail ed description of substitutions, R-groups  and preferred embodiments
  MOD_RES (18)..(21): Any L- or D-natural or non-natural amino acid, and this range may     encompass 1 or 4 residues; see specification as filed for detailed  description of substitutions, R-groups and preferred emb
  c-term may be amidated
VPLSRTXRXTXISXSNQXXXXKAIKNLLKAVSKE

SEQ ID NO: 439 - protein, 34 aa, Artificial Sequence
  Description of Artificial Sequence: Synthetic peptide
  MOD_RES (8)..(9): Any L- or D-natural amino acid and any non-natural amino acid; see  specification as filed for detail ed description of substitutions, R-groups  and preferred embodiments
  MOD_RES (11)..(11): Any L- or D-natural amino acid and any non-natural amino acid; see  specification as filed for detail ed description of substitutions, R-groups  and preferred embodiments
  MOD_RES (14)..(14): Any L- or D-natural amino acid and any non-natural amino acid; see  specification as filed for detail ed description of substitutions, R-groups  and preferred embodiments
  MOD_RES (18)..(21): Any L- or D-natural or non-natural amino acid, and this range may     encompass 1 or 4 residues; see specification as filed for detailed  description of substitutions, R-groups and preferred emb
  c-term may be amidated
VPLSRTVXXTXISXSNQXXXXKAIKNLLKAVSKE

SEQ ID NO: 440 - protein, 34 aa, Artificial Sequence
  Description of Artificial Sequence: Synthetic peptide
  MOD_RES (16)..(16): Any L- or D-natural amino acid and any non-natural amino acid; see  specification as filed for detail ed description of substitutions, R-groups  and preferred embodiments
  MOD_RES (18)..(21): Any L- or D-natural or non-natural amino acid, and this range may     encompass 1 or 4 residues; see specification as filed for detailed  description of substitutions, R-groups and preferred emb
  c-term may be amidated
VPLSRTVRCTCISISXQXXXXKAIKNLLKAVSKE

SEQ ID NO: 441 - protein, 34 aa, Artificial Sequence
  Description of Artificial Sequence: Synthetic peptide
  MOD_RES (1)..(1): Any L- or D-natural amino acid and any non-natural amino acid; see  specification as filed for detail ed description of substitutions, R-groups  and preferred embodiments
  MOD_RES (9)..(9): Any L- or D-natural amino acid and any non-natural amino acid; see  specification as filed for detail ed description of substitutions, R-groups  and preferred embodiments
  MOD_RES (11)..(11): Any L- or D-natural amino acid and any non-natural amino acid; see  specification as filed for detail ed description of substitutions, R-groups  and preferred embodiments
  MOD_RES (16)..(16): Any L- or D-natural amino acid and any non-natural amino acid; see  specification as filed for detail ed description of substitutions, R-groups  and preferred embodiments
  MOD_RES (18)..(21): Any L- or D-natural or non-natural amino acid, and this range may     encompass 1 or 4 residues; see specification as filed for detailed  description of substitutions, R-groups and preferred emb
  c-term may be amidated
XPLSRTVRXTXISISXQXXXXKAIKNLLKAVSKE

SEQ ID NO: 442 - protein, 34 aa, Artificial Sequence
  Description of Artificial Sequence: Synthetic peptide
  MOD_RES (2)..(2): Any L- or D-natural amino acid and any non-natural amino acid; see  specification as filed for detail ed description of substitutions, R-groups  and preferred embodiments
  MOD_RES (9)..(9): Any L- or D-natural amino acid and any non-natural amino acid; see  specification as filed for detail ed description of substitutions, R-groups  and preferred embodiments
  MOD_RES (11)..(11): Any L- or D-natural amino acid and any non-natural amino acid; see  specification as filed for detail ed description of substitutions, R-groups  and preferred embodiments
  MOD_RES (16)..(16): Any L- or D-natural amino acid and any non-natural amino acid; see  specification as filed for detail ed description of substitutions, R-groups  and preferred embodiments
  MOD_RES (18)..(21): Any L- or D-natural or non-natural amino acid, and this range may     encompass 1 or 4 residues; see specification as filed for detailed  description of substitutions, R-groups and preferred emb
  c-term may be amidated
VXLSRTVRXTXISISXQXXXXKAIKNLLKAVSKE

SEQ ID NO: 443 - protein, 34 aa, Artificial Sequence
  Description of Artificial Sequence: Synthetic peptide
  MOD_RES (3)..(3): Any L- or D-natural amino acid and any non-natural amino acid; see  specification as filed for detail ed description of substitutions, R-groups  and preferred embodiments
  MOD_RES (9)..(9): Any L- or D-natural amino acid and any non-natural amino acid; see  specification as filed for detail ed description of substitutions, R-groups  and preferred embodiments
  MOD_RES (11)..(11): Any L- or D-natural amino acid and any non-natural amino acid; see  specification as filed for detail ed description of substitutions, R-groups  and preferred embodiments
  MOD_RES (16)..(16): Any L- or D-natural amino acid and any non-natural amino acid; see  specification as filed for detail ed description of substitutions, R-groups  and preferred embodiments
  MOD_RES (18)..(21): Any L- or D-natural or non-natural amino acid, and this range may     encompass 1 or 4 residues; see specification as filed for detailed  description of substitutions, R-groups and preferred emb
  c-term may be amidated
VPXSRTVRXTXISISXQXXXXKAIKNLLKAVSKE

SEQ ID NO: 444 - protein, 34 aa, Artificial Sequence
  Description of Artificial Sequence: Synthetic peptide
  MOD_RES (4)..(4): Any L- or D-natural amino acid and any non-natural amino acid; see  specification as filed for detail ed description of substitutions, R-groups  and preferred embodiments
  MOD_RES (9)..(9): Any L- or D-natural amino acid and any non-natural amino acid; see  specification as filed for detail ed description of substitutions, R-groups  and preferred embodiments
  MOD_RES (11)..(11): Any L- or D-natural amino acid and any non-natural amino acid; see  specification as filed for detail ed description of substitutions, R-groups  and preferred embodiments
  MOD_RES (16)..(16): Any L- or D-natural amino acid and any non-natural amino acid; see  specification as filed for detail ed description of substitutions, R-groups  and preferred embodiments
  MOD_RES (18)..(21): Any L- or D-natural or non-natural amino acid, and this range may     encompass 1 or 4 residues; see specification as filed for detailed  description of substitutions, R-groups and preferred emb
  c-term may be amidated
VPLXRTVRXTXISISXQXXXXKAIKNLLKAVSKE

SEQ ID NO: 445 - protein, 34 aa, Artificial Sequence
  Description of Artificial Sequence: Synthetic peptide
  MOD_RES (5)..(5): Any L- or D-natural amino acid and any non-natural amino acid; see  specification as filed for detail ed description of substitutions, R-groups  and preferred embodiments
  MOD_RES (9)..(9): Any L- or D-natural amino acid and any non-natural amino acid; see  specification as filed for detail ed description of substitutions, R-groups  and preferred embodiments
  MOD_RES (11)..(11): Any L- or D-natural amino acid and any non-natural amino acid; see  specification as filed for detail ed description of substitutions, R-groups  and preferred embodiments
  MOD_RES (16)..(16): Any L- or D-natural amino acid and any non-natural amino acid; see  specification as filed for detail ed description of substitutions, R-groups  and preferred embodiments
  MOD_RES (18)..(21): Any L- or D-natural or non-natural amino acid, and this range may     encompass 1 or 4 residues; see specification as filed for detailed  description of substitutions, R-groups and preferred emb
  c-term may be amidated
VPLSXTVRXTXISISXQXXXXKAIKNLLKAVSKE

SEQ ID NO: 446 - protein, 34 aa, Artificial Sequence
  Description of Artificial Sequence: Synthetic peptide
  MOD_RES (6)..(6): Any L- or D-natural amino acid and any non-natural amino acid; see  specification as filed for detail ed description of substitutions, R-groups  and preferred embodiments
  MOD_RES (9)..(9): Any L- or D-natural amino acid and any non-natural amino acid; see  specification as filed for detail ed description of substitutions, R-groups  and preferred embodiments
  MOD_RES (11)..(11): Any L- or D-natural amino acid and any non-natural amino acid; see  specification as filed for detail ed description of substitutions, R-groups  and preferred embodiments
  MOD_RES (16)..(16): Any L- or D-natural amino acid and any non-natural amino acid; see  specification as filed for detail ed description of substitutions, R-groups  and preferred embodiments
  MOD_RES (18)..(21): Any L- or D-natural or non-natural amino acid, and this range may     encompass 1 or 4 residues; see specification as filed for detailed  description of substitutions, R-groups and preferred emb
  c-term may be amidated
VPLSRXVRXTXISISXQXXXXKAIKNLLKAVSKE

SEQ ID NO: 447 - protein, 34 aa, Artificial Sequence
  Description of Artificial Sequence: Synthetic peptide
  MOD_RES (7)..(7): Any L- or D-natural amino acid and any non-natural amino acid; see  specification as filed for detail ed description of substitutions, R-groups  and preferred embodiments
  MOD_RES (9)..(9): Any L- or D-natural amino acid and any non-natural amino acid; see  specification as filed for detail ed description of substitutions, R-groups  and preferred embodiments
  MOD_RES (11)..(11): Any L- or D-natural amino acid and any non-natural amino acid; see  specification as filed for detail ed description of substitutions, R-groups  and preferred embodiments
  MOD_RES (16)..(16): Any L- or D-natural amino acid and any non-natural amino acid; see  specification as filed for detail ed description of substitutions, R-groups  and preferred embodiments
  MOD_RES (18)..(21): Any L- or D-natural or non-natural amino acid, and this range may     encompass 1 or 4 residues; see specification as filed for detailed  description of substitutions, R-groups and preferred emb
  c-term may be amidated
VPLSRTXRXTXISISXQXXXXKAIKNLLKAVSKE

SEQ ID NO: 448 - protein, 34 aa, Artificial Sequence
  Description of Artificial Sequence: Synthetic peptide
  MOD_RES (8)..(9): Any L- or D-natural amino acid and any non-natural amino acid; see  specification as filed for detail ed description of substitutions, R-groups  and preferred embodiments
  MOD_RES (11)..(11): Any L- or D-natural amino acid and any non-natural amino acid; see  specification as filed for detail ed description of substitutions, R-groups  and preferred embodiments
  MOD_RES (16)..(16): Any L- or D-natural amino acid and any non-natural amino acid; see  specification as filed for detail ed description of substitutions, R-groups  and preferred embodiments
  MOD_RES (18)..(21): Any L- or D-natural or non-natural amino acid, and this range may     encompass 1 or 4 residues; see specification as filed for detailed  description of substitutions, R-groups and preferred emb
  c-term may be amidated
VPLSRTVXXTXISISXQXXXXKAIKNLLKAVSKE

SEQ ID NO: 449 - protein, 34 aa, Artificial Sequence
  Description of Artificial Sequence: Synthetic peptide
  MOD_RES (17)..(17): Any L- or D-natural amino acid and any non-natural amino acid; see  specification as filed for detail ed description of substitutions, R-groups  and preferred embodiments
  MOD_RES (18)..(21): Any L- or D-natural or non-natural amino acid, and this range may     encompass 1 or 4 residues; see specification as filed for detailed  description of substitutions, R-groups and preferred emb
  c-term may be amidated
VPLSRTVRCTCISISQXXXXXKAIKNLLKAVSKE

SEQ ID NO: 450 - protein, 34 aa, Artificial Sequence
  Description of Artificial Sequence: Synthetic peptide
  MOD_RES (1)..(1): Any L- or D-natural amino acid and any non-natural amino acid; see  specification as filed for detail ed description of substitutions, R-groups  and preferred embodiments
  MOD_RES (9)..(9): Any L- or D-natural amino acid and any non-natural amino acid; see  specification as filed for detail ed description of substitutions, R-groups  and preferred embodiments
  MOD_RES (11)..(11): Any L- or D-natural amino acid and any non-natural amino acid; see  specification as filed for detail ed description of substitutions, R-groups  and preferred embodiments
  MOD_RES (17)..(17): Any L- or D-natural amino acid and any non-natural amino acid; see  specification as filed for detail ed description of substitutions, R-groups  and preferred embodiments
  MOD_RES (18)..(21): Any L- or D-natural or non-natural amino acid, and this range may     encompass 1 or 4 residues; see specification as filed for detailed  description of substitutions, R-groups and preferred emb
  c-term may be amidated
XPLSRTVRXTXISISQXXXXXKAIKNLLKAVSKE

SEQ ID NO: 451 - protein, 34 aa, Artificial Sequence
  Description of Artificial Sequence: Synthetic peptide
  MOD_RES (2)..(2): Any L- or D-natural amino acid and any non-natural amino acid; see  specification as filed for detail ed description of substitutions, R-groups  and preferred embodiments
  MOD_RES (9)..(9): Any L- or D-natural amino acid and any non-natural amino acid; see  specification as filed for detail ed description of substitutions, R-groups  and preferred embodiments
  MOD_RES (11)..(11): Any L- or D-natural amino acid and any non-natural amino acid; see  specification as filed for detail ed description of substitutions, R-groups  and preferred embodiments
  MOD_RES (17)..(17): Any L- or D-natural amino acid and any non-natural amino acid; see  specification as filed for detail ed description of substitutions, R-groups  and preferred embodiments
  MOD_RES (18)..(21): Any L- or D-natural or non-natural amino acid, and this range may     encompass 1 or 4 residues; see specification as filed for detailed  description of substitutions, R-groups and preferred emb
  c-term may be amidated
VXLSRTVRXTXISISQXXXXXKAIKNLLKAVSKE

SEQ ID NO: 452 - protein, 34 aa, Artificial Sequence
  Description of Artificial Sequence: Synthetic peptide
  MOD_RES (3)..(3): Any L- or D-natural amino acid and any non-natural amino acid; see  specification as filed for detail ed description of substitutions, R-groups  and preferred embodiments
  MOD_RES (9)..(9): Any L- or D-natural amino acid and any non-natural amino acid; see  specification as filed for detail ed description of substitutions, R-groups  and preferred embodiments
  MOD_RES (11)..(11): Any L- or D-natural amino acid and any non-natural amino acid; see  specification as filed for detail ed description of substitutions, R-groups  and preferred embodiments
  MOD_RES (17)..(17): Any L- or D-natural amino acid and any non-natural amino acid; see  specification as filed for detail ed description of substitutions, R-groups  and preferred embodiments
  MOD_RES (18)..(21): Any L- or D-natural or non-natural amino acid, and this range may     encompass 1 or 4 residues; see specification as filed for detailed  description of substitutions, R-groups and preferred emb
  c-term may be amidated
VPXSRTVRXTXISISQXXXXXKAIKNLLKAVSKE

SEQ ID NO: 453 - protein, 34 aa, Artificial Sequence
  Description of Artificial Sequence: Synthetic peptide
  MOD_RES (4)..(4): Any L- or D-natural amino acid and any non-natural amino acid; see  specification as filed for detail ed description of substitutions, R-groups  and preferred embodiments
  MOD_RES (9)..(9): Any L- or D-natural amino acid and any non-natural amino acid; see  specification as filed for detail ed description of substitutions, R-groups  and preferred embodiments
  MOD_RES (11)..(11): Any L- or D-natural amino acid and any non-natural amino acid; see  specification as filed for detail ed description of substitutions, R-groups  and preferred embodiments
  MOD_RES (17)..(17): Any L- or D-natural amino acid and any non-natural amino acid; see  specification as filed for detail ed description of substitutions, R-groups  and preferred embodiments
  MOD_RES (18)..(21): Any L- or D-natural or non-natural amino acid, and this range may     encompass 1 or 4 residues; see specification as filed for detailed  description of substitutions, R-groups and preferred emb
  c-term may be amidated
VPLXRTVRXTXISISQXXXXXKAIKNLLKAVSKE

SEQ ID NO: 454 - protein, 34 aa, Artificial Sequence
  Description of Artificial Sequence: Synthetic peptide
  MOD_RES (5)..(5): Any L- or D-natural amino acid and any non-natural amino acid; see  specification as filed for detail ed description of substitutions, R-groups  and preferred embodiments
  MOD_RES (9)..(9): Any L- or D-natural amino acid and any non-natural amino acid; see  specification as filed for detail ed description of substitutions, R-groups  and preferred embodiments
  MOD_RES (11)..(11): Any L- or D-natural amino acid and any non-natural amino acid; see  specification as filed for detail ed description of substitutions, R-groups  and preferred embodiments
  MOD_RES (17)..(17): Any L- or D-natural amino acid and any non-natural amino acid; see  specification as filed for detail ed description of substitutions, R-groups  and preferred embodiments
  MOD_RES (18)..(21): Any L- or D-natural or non-natural amino acid, and this range may     encompass 1 or 4 residues; see specification as filed for detailed  description of substitutions, R-groups and preferred emb
  c-term may be amidated
VPLSXTVRXTXISISQXXXXXKAIKNLLKAVSKE

SEQ ID NO: 455 - protein, 34 aa, Artificial Sequence
  Description of Artificial Sequence: Synthetic peptide
  MOD_RES (6)..(6): Any L- or D-natural amino acid and any non-natural amino acid; see  specification as filed for detail ed description of substitutions, R-groups  and preferred embodiments
  MOD_RES (9)..(9): Any L- or D-natural amino acid and any non-natural amino acid; see  specification as filed for detail ed description of substitutions, R-groups  and preferred embodiments
  MOD_RES (11)..(11): Any L- or D-natural amino acid and any non-natural amino acid; see  specification as filed for detail ed description of substitutions, R-groups  and preferred embodiments
  MOD_RES (17)..(17): Any L- or D-natural amino acid and any non-natural amino acid; see  specification as filed for detail ed description of substitutions, R-groups  and preferred embodiments
  MOD_RES (18)..(21): Any L- or D-natural or non-natural amino acid, and this range may     encompass 1 or 4 residues; see specification as filed for detailed  description of substitutions, R-groups and preferred emb
  c-term may be amidated
VPLSRXVRXTXISISQXXXXXKAIKNLLKAVSKE

SEQ ID NO: 456 - protein, 34 aa, Artificial Sequence
  Description of Artificial Sequence: Synthetic peptide
  MOD_RES (7)..(7): Any L- or D-natural amino acid and any non-natural amino acid; see  specification as filed for detail ed description of substitutions, R-groups  and preferred embodiments
  MOD_RES (9)..(9): Any L- or D-natural amino acid and any non-natural amino acid; see  specification as filed for detail ed description of substitutions, R-groups  and preferred embodiments
  MOD_RES (11)..(11): Any L- or D-natural amino acid and any non-natural amino acid; see  specification as filed for detail ed description of substitutions, R-groups  and preferred embodiments
  MOD_RES (17)..(17): Any L- or D-natural amino acid and any non-natural amino acid; see  specification as filed for detail ed description of substitutions, R-groups  and preferred embodiments
  MOD_RES (18)..(21): Any L- or D-natural or non-natural amino acid, and this range may     encompass 1 or 4 residues; see specification as filed for detailed  description of substitutions, R-groups and preferred emb
  c-term may be amidated
VPLSRTXRXTXISISQXXXXXKAIKNLLKAVSKE

SEQ ID NO: 457 - protein, 34 aa, Artificial Sequence
  Description of Artificial Sequence: Synthetic peptide
  MOD_RES (8)..(9): Any L- or D-natural amino acid and any non-natural amino acid; see  specification as filed for detail ed description of substitutions, R-groups  and preferred embodiments
  MOD_RES (11)..(11): Any L- or D-natural amino acid and any non-natural amino acid; see  specification as filed for detail ed description of substitutions, R-groups  and preferred embodiments
  MOD_RES (17)..(17): Any L- or D-natural amino acid and any non-natural amino acid; see  specification as filed for detail ed description of substitutions, R-groups  and preferred embodiments
  MOD_RES (18)..(21): Any L- or D-natural or non-natural amino acid, and this range may     encompass 1 or 4 residues; see specification as filed for detailed  description of substitutions, R-groups and preferred emb
  c-term may be amidated
VPLSRTVXXTXISISQXXXXXKAIKNLLKAVSKE

SEQ ID NO: 458 - protein, 31 aa, Artificial Sequence; identical to SEQ ID NO: 188
  Description of Artificial Sequence: Synthetic peptide
  MOD_RES (15)..(18): Any L- or D-natural or non-natural amino acid, and this range may     encompass 1 or 4 residues; see specification as filed for detailed  description of substitutions, R-groups and preferred emb
  c-term may be amidated

SEQ ID NO: 459 - protein, 31 aa, Artificial Sequence; identical to SEQ ID NO: 189
  Description of Artificial Sequence: Synthetic peptide
  MOD_RES (1)..(1): Any L- or D-natural amino acid and any non-natural amino acid; see  specification as filed for detail ed description of substitutions, R-groups  and preferred embodiments
  MOD_RES (9)..(9): Any L- or D-natural amino acid and any non-natural amino acid; see  specification as filed for detail ed description of substitutions, R-groups  and preferred embodiments
  MOD_RES (11)..(11): Any L- or D-natural amino acid and any non-natural amino acid; see  specification as filed for detail ed description of substitutions, R-groups  and preferred embodiments
  MOD_RES (15)..(18): Any L- or D-natural or non-natural amino acid, and this range may     encompass 1 or 4 residues; see specification as filed for detailed  description of substitutions, R-groups and preferred emb
  c-term may be amidated

SEQ ID NO: 460 - protein, 31 aa, Artificial Sequence; identical to SEQ ID NO: 190
  Description of Artificial Sequence: Synthetic peptide
  MOD_RES (2)..(2): Any L- or D-natural amino acid and any non-natural amino acid; see  specification as filed for detail ed description of substitutions, R-groups  and preferred embodiments
  MOD_RES (9)..(9): Any L- or D-natural amino acid and any non-natural amino acid; see  specification as filed for detail ed description of substitutions, R-groups  and preferred embodiments
  MOD_RES (11)..(11): Any L- or D-natural amino acid and any non-natural amino acid; see  specification as filed for detail ed description of substitutions, R-groups  and preferred embodiments
  MOD_RES (15)..(18): Any L- or D-natural or non-natural amino acid, and this range may     encompass 1 or 4 residues; see specification as filed for detailed  description of substitutions, R-groups and preferred emb
  c-term may be amidated

SEQ ID NO: 461 - protein, 31 aa, Artificial Sequence; identical to SEQ ID NO: 191
  Description of Artificial Sequence: Synthetic peptide
  MOD_RES (3)..(3): Any L- or D-natural amino acid and any non-natural amino acid; see  specification as filed for detail ed description of substitutions, R-groups  and preferred embodiments
  MOD_RES (9)..(9): Any L- or D-natural amino acid and any non-natural amino acid; see  specification as filed for detail ed description of substitutions, R-groups  and preferred embodiments
  MOD_RES (11)..(11): Any L- or D-natural amino acid and any non-natural amino acid; see  specification as filed for detail ed description of substitutions, R-groups  and preferred embodiments
  MOD_RES (15)..(18): Any L- or D-natural or non-natural amino acid, and this range may     encompass 1 or 4 residues; see specification as filed for detailed  description of substitutions, R-groups and preferred emb
  c-term may be amidated

SEQ ID NO: 462 - protein, 31 aa, Artificial Sequence; identical to SEQ ID NO: 192
  Description of Artificial Sequence: Synthetic peptide
  MOD_RES (4)..(4): Any L- or D-natural amino acid and any non-natural amino acid; see  specification as filed for detail ed description of substitutions, R-groups  and preferred embodiments
  MOD_RES (9)..(9): Any L- or D-natural amino acid and any non-natural amino acid; see  specification as filed for detail ed description of substitutions, R-groups  and preferred embodiments
  MOD_RES (11)..(11): Any L- or D-natural amino acid and any non-natural amino acid; see  specification as filed for detail ed description of substitutions, R-groups  and preferred embodiments
  MOD_RES (15)..(18): Any L- or D-natural or non-natural amino acid, and this range may     encompass 1 or 4 residues; see specification as filed for detailed  description of substitutions, R-groups and preferred emb
  c-term may be amidated

SEQ ID NO: 463 - protein, 31 aa, Artificial Sequence; identical to SEQ ID NO: 193
  Description of Artificial Sequence: Synthetic peptide
  MOD_RES (5)..(5): Any L- or D-natural amino acid and any non-natural amino acid; see  specification as filed for detail ed description of substitutions, R-groups  and preferred embodiments
  MOD_RES (9)..(9): Any L- or D-natural amino acid and any non-natural amino acid; see  specification as filed for detail ed description of substitutions, R-groups  and preferred embodiments
  MOD_RES (11)..(11): Any L- or D-natural amino acid and any non-natural amino acid; see  specification as filed for detail ed description of substitutions, R-groups  and preferred embodiments
  MOD_RES (15)..(18): Any L- or D-natural or non-natural amino acid, and this range may     encompass 1 or 4 residues; see specification as filed for detailed  description of substitutions, R-groups and preferred emb
  c-term may be amidated

SEQ ID NO: 464 - protein, 31 aa, Artificial Sequence; identical to SEQ ID NO: 194
  Description of Artificial Sequence: Synthetic peptide
  MOD_RES (6)..(6): Any L- or D-natural amino acid and any non-natural amino acid; see  specification as filed for detail ed description of substitutions, R-groups  and preferred embodiments
  MOD_RES (9)..(9): Any L- or D-natural amino acid and any non-natural amino acid; see  specification as filed for detail ed description of substitutions, R-groups  and preferred embodiments
  MOD_RES (11)..(11): Any L- or D-natural amino acid and any non-natural amino acid; see  specification as filed for detail ed description of substitutions, R-groups  and preferred embodiments
  MOD_RES (15)..(18): Any L- or D-natural or non-natural amino acid, and this range may     encompass 1 or 4 residues; see specification as filed for detailed  description of substitutions, R-groups and preferred emb
  c-term may be amidated

SEQ ID NO: 465 - protein, 31 aa, Artificial Sequence; identical to SEQ ID NO: 195
  Description of Artificial Sequence: Synthetic peptide
  MOD_RES (7)..(7): Any L- or D-natural amino acid and any non-natural amino acid; see  specification as filed for detail ed description of substitutions, R-groups  and preferred embodiments
  MOD_RES (9)..(9): Any L- or D-natural amino acid and any non-natural amino acid; see  specification as filed for detail ed description of substitutions, R-groups  and preferred embodiments
  MOD_RES (11)..(11): Any L- or D-natural amino acid and any non-natural amino acid; see  specification as filed for detail ed description of substitutions, R-groups  and preferred embodiments
  MOD_RES (15)..(18): Any L- or D-natural or non-natural amino acid, and this range may     encompass 1 or 4 residues; see specification as filed for detailed  description of substitutions, R-groups and preferred emb
  c-term may be amidated

SEQ ID NO: 466 - protein, 31 aa, Artificial Sequence; identical to SEQ ID NO: 196
  Description of Artificial Sequence: Synthetic peptide
  MOD_RES (8)..(9): Any L- or D-natural amino acid and any non-natural amino acid; see  specification as filed for detail ed description of substitutions, R-groups  and preferred embodiments
  MOD_RES (11)..(11): Any L- or D-natural amino acid and any non-natural amino acid; see  specification as filed for detail ed description of substitutions, R-groups  and preferred embodiments
  MOD_RES (15)..(18): Any L- or D-natural or non-natural amino acid, and this range may     encompass 1 or 4 residues; see specification as filed for detailed  description of substitutions, R-groups and preferred emb
  c-term may be amidated

SEQ ID NO: 467 - protein, 31 aa, Artificial Sequence; identical to SEQ ID NO: 197
  Description of Artificial Sequence: Synthetic peptide
  MOD_RES (12)..(12): Any L- or D-natural amino acid and any non-natural amino acid; see  specification as filed for detail ed description of substitutions, R-groups  and preferred embodiments
  MOD_RES (15)..(18): Any L- or D-natural or non-natural amino acid, and this range may     encompass 1 or 4 residues; see specification as filed for detailed  description of substitutions, R-groups and preferred emb
  c-term may be amidated

SEQ ID NO: 468 - protein, 31 aa, Artificial Sequence; identical to SEQ ID NO: 198
  Description of Artificial Sequence: Synthetic peptide
  MOD_RES (1)..(1): Any L- or D-natural amino acid and any non-natural amino acid; see  specification as filed for detail ed description of substitutions, R-groups  and preferred embodiments
  MOD_RES (9)..(9): Any L- or D-natural amino acid and any non-natural amino acid; see  specification as filed for detail ed description of substitutions, R-groups  and preferred embodiments
  MOD_RES (11)..(12): Any L- or D-natural amino acid and any non-natural amino acid; see  specification as filed for detail ed description of substitutions, R-groups  and preferred embodiments
  MOD_RES (15)..(18): Any L- or D-natural or non-natural amino acid, and this range may     encompass 1 or 4 residues; see specification as filed for detailed  description of substitutions, R-groups and preferred emb
  c-term may be amidated

SEQ ID NO: 469 - protein, 31 aa, Artificial Sequence; identical to SEQ ID NO: 199
  Description of Artificial Sequence: Synthetic peptide
  MOD_RES (2)..(2): Any L- or D-natural amino acid and any non-natural amino acid; see  specification as filed for detail ed description of substitutions, R-groups  and preferred embodiments
  MOD_RES (9)..(9): Any L- or D-natural amino acid and any non-natural amino acid; see  specification as filed for detail ed description of substitutions, R-groups  and preferred embodiments
  MOD_RES (11)..(12): Any L- or D-natural amino acid and any non-natural amino acid; see  specification as filed for detail ed description of substitutions, R-groups  and preferred embodiments
  MOD_RES (15)..(18): Any L- or D-natural or non-natural amino acid, and this range may     encompass 1 or 4 residues; see specification as filed for detailed  description of substitutions, R-groups and preferred emb
  c-term may be amidated

SEQ ID NO: 470 - protein, 31 aa, Artificial Sequence; identical to SEQ ID NO: 200
  Description of Artificial Sequence: Synthetic peptide
  MOD_RES (3)..(3): Any L- or D-natural amino acid and any non-natural amino acid; see  specification as filed for detail ed description of substitutions, R-groups  and preferred embodiments
  MOD_RES (9)..(9): Any L- or D-natural amino acid and any non-natural amino acid; see  specification as filed for detail ed description of substitutions, R-groups  and preferred embodiments
  MOD_RES (11)..(12): Any L- or D-natural amino acid and any non-natural amino acid; see  specification as filed for detail ed description of substitutions, R-groups  and preferred embodiments
  MOD_RES (15)..(18): Any L- or D-natural or non-natural amino acid, and this range may     encompass 1 or 4 residues; see specification as filed for detailed  description of substitutions, R-groups and preferred emb
  c-term may be amidated

SEQ ID NO: 471 - protein, 31 aa, Artificial Sequence; identical to SEQ ID NO: 201
  Description of Artificial Sequence: Synthetic peptide
  MOD_RES (4)..(4): Any L- or D-natural amino acid and any non-natural amino acid; see  specification as filed for detail ed description of substitutions, R-groups  and preferred embodiments
  MOD_RES (9)..(9): Any L- or D-natural amino acid and any non-natural amino acid; see  specification as filed for detail ed description of substitutions, R-groups  and preferred embodiments
  MOD_RES (11)..(12): Any L- or D-natural amino acid and any non-natural amino acid; see  specification as filed for detail ed description of substitutions, R-groups  and preferred embodiments
  MOD_RES (15)..(18): Any L- or D-natural or non-natural amino acid, and this range may     encompass 1 or 4 residues; see specification as filed for detailed  description of substitutions, R-groups and preferred emb
  c-term may be amidated

SEQ ID NO: 472 - protein, 31 aa, Artificial Sequence; identical to SEQ ID NO: 202
  Description of Artificial Sequence: Synthetic peptide
  MOD_RES (5)..(5): Any L- or D-natural amino acid and any non-natural amino acid; see  specification as filed for detail ed description of substitutions, R-groups  and preferred embodiments
  MOD_RES (9)..(9): Any L- or D-natural amino acid and any non-natural amino acid; see  specification as filed for detail ed description of substitutions, R-groups  and preferred embodiments
  MOD_RES (11)..(12): Any L- or D-natural amino acid and any non-natural amino acid; see  specification as filed for detail ed description of substitutions, R-groups  and preferred embodiments
  MOD_RES (15)..(18): Any L- or D-natural or non-natural amino acid, and this range may     encompass 1 or 4 residues; see specification as filed for detailed  description of substitutions, R-groups and preferred emb
  c-term may be amidated

SEQ ID NO: 473 - protein, 31 aa, Artificial Sequence; identical to SEQ ID NO: 203
  Description of Artificial Sequence: Synthetic peptide
  MOD_RES (6)..(6): Any L- or D-natural amino acid and any non-natural amino acid; see  specification as filed for detail ed description of substitutions, R-groups  and preferred embodiments
  MOD_RES (9)..(9): Any L- or D-natural amino acid and any non-natural amino acid; see  specification as filed for detail ed description of substitutions, R-groups  and preferred embodiments
  MOD_RES (11)..(12): Any L- or D-natural amino acid and any non-natural amino acid; see  specification as filed for detail ed description of substitutions, R-groups  and preferred embodiments
  MOD_RES (15)..(18): Any L- or D-natural or non-natural amino acid, and this range may     encompass 1 or 4 residues; see specification as filed for detailed  description of substitutions, R-groups and preferred emb
  c-term may be amidated

SEQ ID NO: 474 - protein, 31 aa, Artificial Sequence; identical to SEQ ID NO: 204
  Description of Artificial Sequence: Synthetic peptide
  MOD_RES (7)..(7): Any L- or D-natural amino acid and any non-natural amino acid; see  specification as filed for detail ed description of substitutions, R-groups  and preferred embodiments
  MOD_RES (9)..(9): Any L- or D-natural amino acid and any non-natural amino acid; see  specification as filed for detail ed description of substitutions, R-groups  and preferred embodiments
  MOD_RES (11)..(12): Any L- or D-natural amino acid and any non-natural amino acid; see  specification as filed for detail ed description of substitutions, R-groups  and preferred embodiments
  MOD_RES (15)..(18): Any L- or D-natural or non-natural amino acid, and this range may     encompass 1 or 4 residues; see specification as filed for detailed  description of substitutions, R-groups and preferred emb
  c-term may be amidated

SEQ ID NO: 475 - protein, 31 aa, Artificial Sequence; identical to SEQ ID NO: 205
  Description of Artificial Sequence: Synthetic peptide
  MOD_RES (8)..(9): Any L- or D-natural amino acid and any non-natural amino acid; see  specification as filed for detail ed description of substitutions, R-groups  and preferred embodiments
  MOD_RES (11)..(12): Any L- or D-natural amino acid and any non-natural amino acid; see  specification as filed for detail ed description of substitutions, R-groups  and preferred embodiments
  MOD_RES (15)..(18): Any L- or D-natural or non-natural amino acid, and this range may     encompass 1 or 4 residues; see specification as filed for detailed  description of substitutions, R-groups and preferred emb
  c-term may be amidated

SEQ ID NO: 476 - protein, 31 aa, Artificial Sequence; identical to SEQ ID NO: 206
  Description of Artificial Sequence: Synthetic peptide
  MOD_RES (13)..(13): Any L- or D-natural amino acid and any non-natural amino acid; see  specification as filed for detail ed description of substitutions, R-groups  and preferred embodiments
  MOD_RES (15)..(18): Any L- or D-natural or non-natural amino acid, and this range may     encompass 1 or 4 residues; see specification as filed for detailed  description of substitutions, R-groups and preferred emb
  c-term may be amidated

SEQ ID NO: 477 - protein, 31 aa, Artificial Sequence; identical to SEQ ID NO: 207
  Description of Artificial Sequence: Synthetic peptide
  MOD_RES (1)..(1): Any L- or D-natural amino acid and any non-natural amino acid; see  specification as filed for detail ed description of substitutions, R-groups  and preferred embodiments
  MOD_RES (9)..(9): Any L- or D-natural amino acid and any non-natural amino acid; see  specification as filed for detail ed description of substitutions, R-groups  and preferred embodiments
  MOD_RES (11)..(11): Any L- or D-natural amino acid and any non-natural amino acid; see  specification as filed for detail ed description of substitutions, R-groups  and preferred embodiments
  MOD_RES (13)..(13): Any L- or D-natural amino acid and any non-natural amino acid; see  specification as filed for detail ed description of substitutions, R-groups  and preferred embodiments
  MOD_RES (15)..(18): Any L- or D-natural or non-natural amino acid, and this range may     encompass 1 or 4 residues; see specification as filed for detailed  description of substitutions, R-groups and preferred emb
  c-term may be amidated

SEQ ID NO: 478 - protein, 31 aa, Artificial Sequence; identical to SEQ ID NO: 208
  Description of Artificial Sequence: Synthetic peptide
  MOD_RES (2)..(2): Any L- or D-natural amino acid and any non-natural amino acid; see  specification as filed for detail ed description of substitutions, R-groups  and preferred embodiments
  MOD_RES (9)..(9): Any L- or D-natural amino acid and any non-natural amino acid; see  specification as filed for detail ed description of substitutions, R-groups  and preferred embodiments
  MOD_RES (11)..(11): Any L- or D-natural amino acid and any non-natural amino acid; see  specification as filed for detail ed description of substitutions, R-groups  and preferred embodiments
  MOD_RES (13)..(13): Any L- or D-natural amino acid and any non-natural amino acid; see  specification as filed for detail ed description of substitutions, R-groups  and preferred embodiments
  MOD_RES (15)..(18): Any L- or D-natural or non-natural amino acid, and this range may     encompass 1 or 4 residues; see specification as filed for detailed  description of substitutions, R-groups and preferred emb
  c-term may be amidated

SEQ ID NO: 479 - protein, 31 aa, Artificial Sequence; identical to SEQ ID NO: 209
  Description of Artificial Sequence: Synthetic peptide
  MOD_RES (3)..(3): Any L- or D-natural amino acid and any non-natural amino acid; see  specification as filed for detail ed description of substitutions, R-groups  and preferred embodiments
  MOD_RES (9)..(9): Any L- or D-natural amino acid and any non-natural amino acid; see  specification as filed for detail ed description of substitutions, R-groups  and preferred embodiments
  MOD_RES (11)..(11): Any L- or D-natural amino acid and any non-natural amino acid; see  specification as filed for detail ed description of substitutions, R-groups  and preferred embodiments
  MOD_RES (13)..(13): Any L- or D-natural amino acid and any non-natural amino acid; see  specification as filed for detail ed description of substitutions, R-groups  and preferred embodiments
  MOD_RES (15)..(18): Any L- or D-natural or non-natural amino acid, and this range may     encompass 1 or 4 residues; see specification as filed for detailed  description of substitutions, R-groups and preferred emb
  c-term may be amidated

SEQ ID NO: 480 - protein, 31 aa, Artificial Sequence; identical to SEQ ID NO: 210
  Description of Artificial Sequence: Synthetic peptide
  MOD_RES (4)..(4): Any L- or D-natural amino acid and any non-natural amino acid; see  specification as filed for detail ed description of substitutions, R-groups  and preferred embodiments
  MOD_RES (9)..(9): Any L- or D-natural amino acid and any non-natural amino acid; see  specification as filed for detail ed description of substitutions, R-groups  and preferred embodiments
  MOD_RES (11)..(11): Any L- or D-natural amino acid and any non-natural amino acid; see  specification as filed for detail ed description of substitutions, R-groups  and preferred embodiments
  MOD_RES (13)..(13): Any L- or D-natural amino acid and any non-natural amino acid; see  specification as filed for detail ed description of substitutions, R-groups  and preferred embodiments
  MOD_RES (15)..(18): Any L- or D-natural or non-natural amino acid, and this range may     encompass 1 or 4 residues; see specification as filed for detailed  description of substitutions, R-groups and preferred emb
  c-term may be amidated

SEQ ID NO: 481 - protein, 31 aa, Artificial Sequence; identical to SEQ ID NO: 211
  Description of Artificial Sequence: Synthetic peptide
  MOD_RES (5)..(5): Any L- or D-natural amino acid and any non-natural amino acid; see  specification as filed for detail ed description of substitutions, R-groups  and preferred embodiments
  MOD_RES (9)..(9): Any L- or D-natural amino acid and any non-natural amino acid; see  specification as filed for detail ed description of substitutions, R-groups  and preferred embodiments
  MOD_RES (11)..(11): Any L- or D-natural amino acid and any non-natural amino acid; see  specification as filed for detail ed description of substitutions, R-groups  and preferred embodiments
  MOD_RES (13)..(13): Any L- or D-natural amino acid and any non-natural amino acid; see  specification as filed for detail ed description of substitutions, R-groups  and preferred embodiments
  MOD_RES (15)..(18): Any L- or D-natural or non-natural amino acid, and this range may     encompass 1 or 4 residues; see specification as filed for detailed  description of substitutions, R-groups and preferred emb
  c-term may be amidated

SEQ ID NO: 482 - protein, 31 aa, Artificial Sequence; identical to SEQ ID NO: 212
  Description of Artificial Sequence: Synthetic peptide
  MOD_RES (6)..(6): Any L- or D-natural amino acid and any non-natural amino acid; see  specification as filed for detail ed description of substitutions, R-groups  and preferred embodiments
  MOD_RES (9)..(9): Any L- or D-natural amino acid and any non-natural amino acid; see  specification as filed for detail ed description of substitutions, R-groups  and preferred embodiments
  MOD_RES (11)..(11): Any L- or D-natural amino acid and any non-natural amino acid; see  specification as filed for detail ed description of substitutions, R-groups  and preferred embodiments
  MOD_RES (13)..(13): Any L- or D-natural amino acid and any non-natural amino acid; see  specification as filed for detail ed description of substitutions, R-groups  and preferred embodiments
  MOD_RES (15)..(18): Any L- or D-natural or non-natural amino acid, and this range may     encompass 1 or 4 residues; see specification as filed for detailed  description of substitutions, R-groups and preferred emb
  c-term may be amidated

SEQ ID NO: 483 - protein, 31 aa, Artificial Sequence; identical to SEQ ID NO: 213
  Description of Artificial Sequence: Synthetic peptide
  MOD_RES (7)..(7): Any L- or D-natural amino acid and any non-natural amino acid; see  specification as filed for detail ed description of substitutions, R-groups  and preferred embodiments
  MOD_RES (9)..(9): Any L- or D-natural amino acid and any non-natural amino acid; see  specification as filed for detail ed description of substitutions, R-groups  and preferred embodiments
  MOD_RES (11)..(11): Any L- or D-natural amino acid and any non-natural amino acid; see  specification as filed for detail ed description of substitutions, R-groups  and preferred embodiments
  MOD_RES (13)..(13): Any L- or D-natural amino acid and any non-natural amino acid; see  specification as filed for detail ed description of substitutions, R-groups  and preferred embodiments
  MOD_RES (15)..(18): Any L- or D-natural or non-natural amino acid, and this range may     encompass 1 or 4 residues; see specification as filed for detailed  description of substitutions, R-groups and preferred emb
  c-term may be amidated

SEQ ID NO: 484 - protein, 31 aa, Artificial Sequence; identical to SEQ ID NO: 214
  Description of Artificial Sequence: Synthetic peptide
  MOD_RES (8)..(9): Any L- or D-natural amino acid and any non-natural amino acid; see  specification as filed for detail ed description of substitutions, R-groups  and preferred embodiments
  MOD_RES (11)..(11): Any L- or D-natural amino acid and any non-natural amino acid; see  specification as filed for detail ed description of substitutions, R-groups  and preferred embodiments
  MOD_RES (13)..(13): Any L- or D-natural amino acid and any non-natural amino acid; see  specification as filed for detail ed description of substitutions, R-groups  and preferred embodiments
  MOD_RES (15)..(18): Any L- or D-natural or non-natural amino acid, and this range may     encompass 1 or 4 residues; see specification as filed for detailed  description of substitutions, R-groups and preferred emb
  c-term may be amidated

SEQ ID NO: 485 - protein, 31 aa, Artificial Sequence; identical to SEQ ID NO: 215
  Description of Artificial Sequence: Synthetic peptide
  MOD_RES (14)..(14): Any L- or D-natural amino acid and any non-natural amino acid; see  specification as filed for detail ed description of substitutions, R-groups  and preferred embodiments
  MOD_RES (15)..(18): Any L- or D-natural or non-natural amino acid, and this range may     encompass 1 or 4 residues; see specification as filed for detailed  description of substitutions, R-groups and preferred emb
  c-term may be amidated

SEQ ID NO: 486 - protein, 31 aa, Artificial Sequence; identical to SEQ ID NO: 216
  Description of Artificial Sequence: Synthetic peptide
  MOD_RES (1)..(1): Any L- or D-natural amino acid and any non-natural amino acid; see  specification as filed for detail ed description of substitutions, R-groups  and preferred embodiments
  MOD_RES (9)..(9): Any L- or D-natural amino acid and any non-natural amino acid; see  specification as filed for detail ed description of substitutions, R-groups  and preferred embodiments
  MOD_RES (11)..(11): Any L- or D-natural amino acid and any non-natural amino acid; see  specification as filed for detail ed description of substitutions, R-groups  and preferred embodiments
  MOD_RES (14)..(14): Any L- or D-natural amino acid and any non-natural amino acid; see  specification as filed for detail ed description of substitutions, R-groups  and preferred embodiments
  MOD_RES (15)..(18): Any L- or D-natural or non-natural amino acid, and this range may     encompass 1 or 4 residues; see specification as filed for detailed  description of substitutions, R-groups and preferred emb
  c-term may be amidated

SEQ ID NO: 487 - protein, 31 aa, Artificial Sequence; identical to SEQ ID NO: 217
  Description of Artificial Sequence: Synthetic peptide
  MOD_RES (2)..(2): Any L- or D-natural amino acid and any non-natural amino acid; see  specification as filed for detail ed description of substitutions, R-groups  and preferred embodiments
  MOD_RES (9)..(9): Any L- or D-natural amino acid and any non-natural amino acid; see  specification as filed for detail ed description of substitutions, R-groups  and preferred embodiments
  MOD_RES (11)..(11): Any L- or D-natural amino acid and any non-natural amino acid; see  specification as filed for detail ed description of substitutions, R-groups  and preferred embodiments
  MOD_RES (14)..(14): Any L- or D-natural amino acid and any non-natural amino acid; see  specification as filed for detail ed description of substitutions, R-groups  and preferred embodiments
  MOD_RES (15)..(18): Any L- or D-natural or non-natural amino acid, and this range may     encompass 1 or 4 residues; see specification as filed for detailed  description of substitutions, R-groups and preferred emb
  c-term may be amidated

SEQ ID NO: 488 - protein, 31 aa, Artificial Sequence; identical to SEQ ID NO: 218
  Description of Artificial Sequence: Synthetic peptide
  MOD_RES (3)..(3): Any L- or D-natural amino acid and any non-natural amino acid; see  specification as filed for detail ed description of substitutions, R-groups  and preferred embodiments
  MOD_RES (9)..(9): Any L- or D-natural amino acid and any non-natural amino acid; see  specification as filed for detail ed description of substitutions, R-groups  and preferred embodiments
  MOD_RES (11)..(11): Any L- or D-natural amino acid and any non-natural amino acid; see  specification as filed for detail ed description of substitutions, R-groups  and preferred embodiments
  MOD_RES (14)..(14): Any L- or D-natural amino acid and any non-natural amino acid; see  specification as filed for detail ed description of substitutions, R-groups  and preferred embodiments
  MOD_RES (15)..(18): Any L- or D-natural or non-natural amino acid, and this range may     encompass 1 or 4 residues; see specification as filed for detailed  description of substitutions, R-groups and preferred emb
  c-term may be amidated

SEQ ID NO: 489 - protein, 31 aa, Artificial Sequence; identical to SEQ ID NO: 219
  Description of Artificial Sequence: Synthetic peptide
  MOD_RES (4)..(4): Any L- or D-natural amino acid and any non-natural amino acid; see  specification as filed for detail ed description of substitutions, R-groups  and preferred embodiments
  MOD_RES (9)..(9): Any L- or D-natural amino acid and any non-natural amino acid; see  specification as filed for detail ed description of substitutions, R-groups  and preferred embodiments
  MOD_RES (11)..(11): Any L- or D-natural amino acid and any non-natural amino acid; see  specification as filed for detail ed description of substitutions, R-groups  and preferred embodiments
  MOD_RES (14)..(14): Any L- or D-natural amino acid and any non-natural amino acid; see  specification as filed for detail ed description of substitutions, R-groups  and preferred embodiments
  MOD_RES (15)..(18): Any L- or D-natural or non-natural amino acid, and this range may     encompass 1 or 4 residues; see specification as filed for detailed  description of substitutions, R-groups and preferred emb
  c-term may be amidated

SEQ ID NO: 490 - protein, 31 aa, Artificial Sequence; identical to SEQ ID NO: 220
  Description of Artificial Sequence: Synthetic peptide
  MOD_RES (5)..(5): Any L- or D-natural amino acid and any non-natural amino acid; see  specification as filed for detail ed description of substitutions, R-groups  and preferred embodiments
  MOD_RES (9)..(9): Any L- or D-natural amino acid and any non-natural amino acid; see  specification as filed for detail ed description of substitutions, R-groups  and preferred embodiments
  MOD_RES (11)..(11): Any L- or D-natural amino acid and any non-natural amino acid; see  specification as filed for detail ed description of substitutions, R-groups  and preferred embodiments
  MOD_RES (14)..(14): Any L- or D-natural amino acid and any non-natural amino acid; see  specification as filed for detail ed description of substitutions, R-groups  and preferred embodiments
  MOD_RES (15)..(18): Any L- or D-natural or non-natural amino acid, and this range may     encompass 1 or 4 residues; see specification as filed for detailed  description of substitutions, R-groups and preferred emb
  c-term may be amidated

SEQ ID NO: 491 - protein, 31 aa, Artificial Sequence; identical to SEQ ID NO: 221
  Description of Artificial Sequence: Synthetic peptide
  MOD_RES (6)..(6): Any L- or D-natural amino acid and any non-natural amino acid; see  specification as filed for detail ed description of substitutions, R-groups  and preferred embodiments
  MOD_RES (9)..(9): Any L- or D-natural amino acid and any non-natural amino acid; see  specification as filed for detail ed description of substitutions, R-groups  and preferred embodiments
  MOD_RES (11)..(11): Any L- or D-natural amino acid and any non-natural amino acid; see  specification as filed for detail ed description of substitutions, R-groups  and preferred embodiments
  MOD_RES (14)..(14): Any L- or D-natural amino acid and any non-natural amino acid; see  specification as filed for detail ed description of substitutions, R-groups  and preferred embodiments
  MOD_RES (15)..(18): Any L- or D-natural or non-natural amino acid, and this range may     encompass 1 or 4 residues; see specification as filed for detailed  description of substitutions, R-groups and preferred emb
  c-term may be amidated

SEQ ID NO: 492 - protein, 31 aa, Artificial Sequence; identical to SEQ ID NO: 222
  Description of Artificial Sequence: Synthetic peptide
  MOD_RES (7)..(7): Any L- or D-natural amino acid and any non-natural amino acid; see  specification as filed for detail ed description of substitutions, R-groups  and preferred embodiments
  MOD_RES (9)..(9): Any L- or D-natural amino acid and any non-natural amino acid; see  specification as filed for detail ed description of substitutions, R-groups  and preferred embodiments
  MOD_RES (11)..(11): Any L- or D-natural amino acid and any non-natural amino acid; see  specification as filed for detail ed description of substitutions, R-groups  and preferred embodiments
  MOD_RES (14)..(14): Any L- or D-natural amino acid and any non-natural amino acid; see  specification as filed for detail ed description of substitutions, R-groups  and preferred embodiments
  MOD_RES (15)..(18): Any L- or D-natural or non-natural amino acid, and this range may     encompass 1 or 4 residues; see specification as filed for detailed  description of substitutions, R-groups and preferred emb
  c-term may be amidated

SEQ ID NO: 493 - protein, 31 aa, Artificial Sequence; identical to SEQ ID NO: 223
  Description of Artificial Sequence: Synthetic peptide
  MOD_RES (8)..(9): Any L- or D-natural amino acid and any non-natural amino acid; see  specification as filed for detail ed description of substitutions, R-groups  and preferred embodiments
  MOD_RES (11)..(11): Any L- or D-natural amino acid and any non-natural amino acid; see  specification as filed for detail ed description of substitutions, R-groups  and preferred embodiments
  MOD_RES (14)..(14): Any L- or D-natural amino acid and any non-natural amino acid; see  specification as filed for detail ed description of substitutions, R-groups  and preferred embodiments
  MOD_RES (15)..(18): Any L- or D-natural or non-natural amino acid, and this range may     encompass 1 or 4 residues; see specification as filed for detailed  description of substitutions, R-groups and preferred emb
  c-term may be amidated

SEQ ID NO: 494 - protein, 34 aa, Artificial Sequence; identical to SEQ ID NO: 296
  Description of Artificial Sequence: Synthetic peptide
  MOD_RES (18)..(21): Any L- or D-natural or non-natural amino acid, and this range may     encompass 1 or 4 residues; see specification as filed for detailed  description of substitutions, R-groups and preferred emb
  c-term may be amidated

SEQ ID NO: 495 - protein, 34 aa, Artificial Sequence; identical to SEQ ID NO: 297
  Description of Artificial Sequence: Synthetic peptide
  MOD_RES (1)..(1): Any L- or D-natural amino acid and any non-natural amino acid; see  specification as filed for detail ed description of substitutions, R-groups  and preferred embodiments
  MOD_RES (9)..(9): Any L- or D-natural amino acid and any non-natural amino acid; see  specification as filed for detail ed description of substitutions, R-groups  and preferred embodiments
  MOD_RES (11)..(11): Any L- or D-natural amino acid and any non-natural amino acid; see  specification as filed for detail ed description of substitutions, R-groups  and preferred embodiments
  MOD_RES (18)..(21): Any L- or D-natural or non-natural amino acid, and this range may     encompass 1 or 4 residues; see specification as filed for detailed  description of substitutions, R-groups and preferred emb
  c-term may be amidated

SEQ ID NO: 496 - protein, 34 aa, Artificial Sequence; identical to SEQ ID NO: 298
  Description of Artificial Sequence: Synthetic peptide
  MOD_RES (2)..(2): Any L- or D-natural amino acid and any non-natural amino acid; see  specification as filed for detail ed description of substitutions, R-groups  and preferred embodiments
  MOD_RES (9)..(9): Any L- or D-natural amino acid and any non-natural amino acid; see  specification as filed for detail ed description of substitutions, R-groups  and preferred embodiments
  MOD_RES (11)..(11): Any L- or D-natural amino acid and any non-natural amino acid; see  specification as filed for detail ed description of substitutions, R-groups  and preferred embodiments
  MOD_RES (18)..(21): Any L- or D-natural or non-natural amino acid, and this range may     encompass 1 or 4 residues; see specification as filed for detailed  description of substitutions, R-groups and preferred emb
  c-term may be amidated

SEQ ID NO: 497 - protein, 34 aa, Artificial Sequence; identical to SEQ ID NO: 299
  Description of Artificial Sequence: Synthetic peptide
  MOD_RES (3)..(3): Any L- or D-natural amino acid and any non-natural amino acid; see  specification as filed for detail ed description of substitutions, R-groups  and preferred embodiments
  MOD_RES (9)..(9): Any L- or D-natural amino acid and any non-natural amino acid; see  specification as filed for detail ed description of substitutions, R-groups  and preferred embodiments
  MOD_RES (11)..(11): Any L- or D-natural amino acid and any non-natural amino acid; see  specification as filed for detail ed description of substitutions, R-groups  and preferred embodiments
  MOD_RES (18)..(21): Any L- or D-natural or non-natural amino acid, and this range may     encompass 1 or 4 residues; see specification as filed for detailed  description of substitutions, R-groups and preferred emb
  c-term may be amidated

SEQ ID NO: 498 - protein, 34 aa, Artificial Sequence; identical to SEQ ID NO: 300
  Description of Artificial Sequence: Synthetic peptide
  MOD_RES (4)..(4): Any L- or D-natural amino acid and any non-natural amino acid; see  specification as filed for detail ed description of substitutions, R-groups  and preferred embodiments
  MOD_RES (9)..(9): Any L- or D-natural amino acid and any non-natural amino acid; see  specification as filed for detail ed description of substitutions, R-groups  and preferred embodiments
  MOD_RES (11)..(11): Any L- or D-natural amino acid and any non-natural amino acid; see  specification as filed for detail ed description of substitutions, R-groups  and preferred embodiments
  MOD_RES (18)..(21): Any L- or D-natural or non-natural amino acid, and this range may     encompass 1 or 4 residues; see specification as filed for detailed  description of substitutions, R-groups and preferred emb
  c-term may be amidated

SEQ ID NO: 499 - protein, 34 aa, Artificial Sequence; identical to SEQ ID NO: 301
  Description of Artificial Sequence: Synthetic peptide
  MOD_RES (5)..(5): Any L- or D-natural amino acid and any non-natural amino acid; see  specification as filed for detail ed description of substitutions, R-groups  and preferred embodiments
  MOD_RES (9)..(9): Any L- or D-natural amino acid and any non-natural amino acid; see  specification as filed for detail ed description of substitutions, R-groups  and preferred embodiments
  MOD_RES (11)..(11): Any L- or D-natural amino acid and any non-natural amino acid; see  specification as filed for detail ed description of substitutions, R-groups  and preferred embodiments
  MOD_RES (18)..(21): Any L- or D-natural or non-natural amino acid, and this range may     encompass 1 or 4 residues; see specification as filed for detailed  description of substitutions, R-groups and preferred emb
  c-term may be amidated

SEQ ID NO: 500 - protein, 34 aa, Artificial Sequence; identical to SEQ ID NO: 302
  Description of Artificial Sequence: Synthetic peptide
  MOD_RES (6)..(6): Any L- or D-natural amino acid and any non-natural amino acid; see  specification as filed for detail ed description of substitutions, R-groups  and preferred embodiments
  MOD_RES (9)..(9): Any L- or D-natural amino acid and any non-natural amino acid; see  specification as filed for detail ed description of substitutions, R-groups  and preferred embodiments
  MOD_RES (11)..(11): Any L- or D-natural amino acid and any non-natural amino acid; see  specification as filed for detail ed description of substitutions, R-groups  and preferred embodiments
  MOD_RES (18)..(21): Any L- or D-natural or non-natural amino acid, and this range may     encompass 1 or 4 residues; see specification as filed for detailed  description of substitutions, R-groups and preferred emb
  c-term may be amidated

SEQ ID NO: 501 - protein, 34 aa, Artificial Sequence; identical to SEQ ID NO: 303
  Description of Artificial Sequence: Synthetic peptide
  MOD_RES (7)..(7): Any L- or D-natural amino acid and any non-natural amino acid; see  specification as filed for detail ed description of substitutions, R-groups  and preferred embodiments
  MOD_RES (9)..(9): Any L- or D-natural amino acid and any non-natural amino acid; see  specification as filed for detail ed description of substitutions, R-groups  and preferred embodiments
  MOD_RES (11)..(11): Any L- or D-natural amino acid and any non-natural amino acid; see  specification as filed for detail ed description of substitutions, R-groups  and preferred embodiments
  MOD_RES (18)..(21): Any L- or D-natural or non-natural amino acid, and this range may     encompass 1 or 4 residues; see specification as filed for detailed  description of substitutions, R-groups and preferred emb
  c-term may be amidated

SEQ ID NO: 502 - protein, 34 aa, Artificial Sequence; identical to SEQ ID NO: 304
  Description of Artificial Sequence: Synthetic peptide
  MOD_RES (8)..(9): Any L- or D-natural amino acid and any non-natural amino acid; see  specification as filed for detail ed description of substitutions, R-groups  and preferred embodiments
  MOD_RES (11)..(11): Any L- or D-natural amino acid and any non-natural amino acid; see  specification as filed for detail ed description of substitutions, R-groups  and preferred embodiments
  MOD_RES (18)..(21): Any L- or D-natural or non-natural amino acid, and this range may     encompass 1 or 4 residues; see specification as filed for detailed  description of substitutions, R-groups and preferred emb
  c-term may be amidated

SEQ ID NO: 503 - protein, 34 aa, Artificial Sequence; identical to SEQ ID NO: 305
  Description of Artificial Sequence: Synthetic peptide
  MOD_RES (12)..(12): Any L- or D-natural amino acid and any non-natural amino acid; see  specification as filed for detail ed description of substitutions, R-groups  and preferred embodiments
  MOD_RES (18)..(21): Any L- or D-natural or non-natural amino acid, and this range may     encompass 1 or 4 residues; see specification as filed for detailed  description of substitutions, R-groups and preferred emb
  c-term may be amidated

SEQ ID NO: 504 - protein, 34 aa, Artificial Sequence; identical to SEQ ID NO: 306
  Description of Artificial Sequence: Synthetic peptide
  MOD_RES (1)..(1): Any L- or D-natural amino acid and any non-natural amino acid; see  specification as filed for detail ed description of substitutions, R-groups  and preferred embodiments
  MOD_RES (9)..(9): Any L- or D-natural amino acid and any non-natural amino acid; see  specification as filed for detail ed description of substitutions, R-groups  and preferred embodiments
  MOD_RES (11)..(12): Any L- or D-natural amino acid and any non-natural amino acid; see  specification as filed for detail ed description of substitutions, R-groups  and preferred embodiments
  MOD_RES (18)..(21): Any L- or D-natural or non-natural amino acid, and this range may     encompass 1 or 4 residues; see specification as filed for detailed  description of substitutions, R-groups and preferred emb
  c-term may be amidated

SEQ ID NO: 505 - protein, 34 aa, Artificial Sequence; identical to SEQ ID NO: 307
  Description of Artificial Sequence: Synthetic peptide
  MOD_RES (2)..(2): Any L- or D-natural amino acid and any non-natural amino acid; see  specification as filed for detail ed description of substitutions, R-groups  and preferred embodiments
  MOD_RES (9)..(9): Any L- or D-natural amino acid and any non-natural amino acid; see  specification as filed for detail ed description of substitutions, R-groups  and preferred embodiments
  MOD_RES (11)..(12): Any L- or D-natural amino acid and any non-natural amino acid; see  specification as filed for detail ed description of substitutions, R-groups  and preferred embodiments
  MOD_RES (18)..(21): Any L- or D-natural or non-natural amino acid, and this range may     encompass 1 or 4 residues; see specification as filed for detailed  description of substitutions, R-groups and preferred emb
  c-term may be amidated

SEQ ID NO: 506 - protein, 34 aa, Artificial Sequence; identical to SEQ ID NO: 308
  Description of Artificial Sequence: Synthetic peptide
  MOD_RES (3)..(3): Any L- or D-natural amino acid and any non-natural amino acid; see  specification as filed for detail ed description of substitutions, R-groups  and preferred embodiments
  MOD_RES (9)..(9): Any L- or D-natural amino acid and any non-natural amino acid; see  specification as filed for detail ed description of substitutions, R-groups  and preferred embodiments
  MOD_RES (11)..(12): Any L- or D-natural amino acid and any non-natural amino acid; see  specification as filed for detail ed description of substitutions, R-groups  and preferred embodiments
  MOD_RES (18)..(21): Any L- or D-natural or non-natural amino acid, and this range may     encompass 1 or 4 residues; see specification as filed for detailed  description of substitutions, R-groups and preferred emb
  c-term may be amidated

SEQ ID NO: 507 - protein, 34 aa, Artificial Sequence; identical to SEQ ID NO: 309
  Description of Artificial Sequence: Synthetic peptide
  MOD_RES (4)..(4): Any L- or D-natural amino acid and any non-natural amino acid; see  specification as filed for detail ed description of substitutions, R-groups  and preferred embodiments
  MOD_RES (9)..(9): Any L- or D-natural amino acid and any non-natural amino acid; see  specification as filed for detail ed description of substitutions, R-groups  and preferred embodiments
  MOD_RES (11)..(12): Any L- or D-natural amino acid and any non-natural amino acid; see  specification as filed for detail ed description of substitutions, R-groups  and preferred embodiments
  MOD_RES (18)..(21): Any L- or D-natural or non-natural amino acid, and this range may     encompass 1 or 4 residues; see specification as filed for detailed  description of substitutions, R-groups and preferred emb
  c-term may be amidated

SEQ ID NO: 508 - protein, 34 aa, Artificial Sequence; identical to SEQ ID NO: 310
  Description of Artificial Sequence: Synthetic peptide
  MOD_RES (5)..(5): Any L- or D-natural amino acid and any non-natural amino acid; see  specification as filed for detail ed description of substitutions, R-groups  and preferred embodiments
  MOD_RES (9)..(9): Any L- or D-natural amino acid and any non-natural amino acid; see  specification as filed for detail ed description of substitutions, R-groups  and preferred embodiments
  MOD_RES (11)..(12): Any L- or D-natural amino acid and any non-natural amino acid; see  specification as filed for detail ed description of substitutions, R-groups  and preferred embodiments
  MOD_RES (18)..(21): Any L- or D-natural or non-natural amino acid, and this range may     encompass 1 or 4 residues; see specification as filed for detailed  description of substitutions, R-groups and preferred emb
  c-term may be amidated

SEQ ID NO: 509 - protein, 34 aa, Artificial Sequence; identical to SEQ ID NO: 311
  Description of Artificial Sequence: Synthetic peptide
  MOD_RES (6)..(6): Any L- or D-natural amino acid and any non-natural amino acid; see  specification as filed for detail ed description of substitutions, R-groups  and preferred embodiments
  MOD_RES (9)..(9): Any L- or D-natural amino acid and any non-natural amino acid; see  specification as filed for detail ed description of substitutions, R-groups  and preferred embodiments
  MOD_RES (11)..(12): Any L- or D-natural amino acid and any non-natural amino acid; see  specification as filed for detail ed description of substitutions, R-groups  and preferred embodiments
  MOD_RES (18)..(21): Any L- or D-natural or non-natural amino acid, and this range may     encompass 1 or 4 residues; see specification as filed for detailed  description of substitutions, R-groups and preferred emb
  c-term may be amidated

SEQ ID NO: 510 - protein, 34 aa, Artificial Sequence; identical to SEQ ID NO: 312
  Description of Artificial Sequence: Synthetic peptide
  MOD_RES (7)..(7): Any L- or D-natural amino acid and any non-natural amino acid; see  specification as filed for detail ed description of substitutions, R-groups  and preferred embodiments
  MOD_RES (9)..(9): Any L- or D-natural amino acid and any non-natural amino acid; see  specification as filed for detail ed description of substitutions, R-groups  and preferred embodiments
  MOD_RES (11)..(12): Any L- or D-natural amino acid and any non-natural amino acid; see  specification as filed for detail ed description of substitutions, R-groups  and preferred embodiments
  MOD_RES (18)..(21): Any L- or D-natural or non-natural amino acid, and this range may     encompass 1 or 4 residues; see specification as filed for detailed  description of substitutions, R-groups and preferred emb
  c-term may be amidated

SEQ ID NO: 511 - protein, 34 aa, Artificial Sequence; identical to SEQ ID NO: 313
  Description of Artificial Sequence: Synthetic peptide
  MOD_RES (8)..(9): Any L- or D-natural amino acid and any non-natural amino acid; see  specification as filed for detail ed description of substitutions, R-groups  and preferred embodiments
  MOD_RES (11)..(12): Any L- or D-natural amino acid and any non-natural amino acid; see  specification as filed for detail ed description of substitutions, R-groups  and preferred embodiments
  MOD_RES (18)..(21): Any L- or D-natural or non-natural amino acid, and this range may     encompass 1 or 4 residues; see specification as filed for detailed  description of substitutions, R-groups and preferred emb
  c-term may be amidated

SEQ ID NO: 512 - protein, 34 aa, Artificial Sequence; identical to SEQ ID NO: 314
  Description of Artificial Sequence: Synthetic peptide
  MOD_RES (13)..(13): Any L- or D-natural amino acid and any non-natural amino acid; see  specification as filed for detail ed description of substitutions, R-groups  and preferred embodiments
  MOD_RES (18)..(21): Any L- or D-natural or non-natural amino acid, and this range may     encompass 1 or 4 residues; see specification as filed for detailed  description of substitutions, R-groups and preferred emb
  c-term may be amidated

SEQ ID NO: 513 - protein, 34 aa, Artificial Sequence; identical to SEQ ID NO: 315
  Description of Artificial Sequence: Synthetic peptide
  MOD_RES (1)..(1): Any L- or D-natural amino acid and any non-natural amino acid; see  specification as filed for detail ed description of substitutions, R-groups  and preferred embodiments
  MOD_RES (9)..(9): Any L- or D-natural amino acid and any non-natural amino acid; see  specification as filed for detail ed description of substitutions, R-groups  and preferred embodiments
  MOD_RES (11)..(11): Any L- or D-natural amino acid and any non-natural amino acid; see  specification as filed for detail ed description of substitutions, R-groups  and preferred embodiments
  MOD_RES (13)..(13): Any L- or D-natural amino acid and any non-natural amino acid; see  specification as filed for detail ed description of substitutions, R-groups  and preferred embodiments
  MOD_RES (18)..(21): Any L- or D-natural or non-natural amino acid, and this range may     encompass 1 or 4 residues; see specification as filed for detailed  description of substitutions, R-groups and preferred emb
  c-term may be amidated

SEQ ID NO: 514 - protein, 34 aa, Artificial Sequence; identical to SEQ ID NO: 316
  Description of Artificial Sequence: Synthetic peptide
  MOD_RES (2)..(2): Any L- or D-natural amino acid and any non-natural amino acid; see  specification as filed for detail ed description of substitutions, R-groups  and preferred embodiments
  MOD_RES (9)..(9): Any L- or D-natural amino acid and any non-natural amino acid; see  specification as filed for detail ed description of substitutions, R-groups  and preferred embodiments
  MOD_RES (11)..(11): Any L- or D-natural amino acid and any non-natural amino acid; see  specification as filed for detail ed description of substitutions, R-groups  and preferred embodiments
  MOD_RES (13)..(13): Any L- or D-natural amino acid and any non-natural amino acid; see  specification as filed for detail ed description of substitutions, R-groups  and preferred embodiments
  MOD_RES (18)..(21): Any L- or D-natural or non-natural amino acid, and this range may     encompass 1 or 4 residues; see specification as filed for detailed  description of substitutions, R-groups and preferred emb
  c-term may be amidated

SEQ ID NO: 515 - protein, 34 aa, Artificial Sequence; identical to SEQ ID NO: 317
  Description of Artificial Sequence: Synthetic peptide
  MOD_RES (3)..(3): Any L- or D-natural amino acid and any non-natural amino acid; see  specification as filed for detail ed description of substitutions, R-groups  and preferred embodiments
  MOD_RES (9)..(9): Any L- or D-natural amino acid and any non-natural amino acid; see  specification as filed for detail ed description of substitutions, R-groups  and preferred embodiments
  MOD_RES (11)..(11): Any L- or D-natural amino acid and any non-natural amino acid; see  specification as filed for detail ed description of substitutions, R-groups  and preferred embodiments
  MOD_RES (13)..(13): Any L- or D-natural amino acid and any non-natural amino acid; see  specification as filed for detail ed description of substitutions, R-groups  and preferred embodiments
  MOD_RES (18)..(21): Any L- or D-natural or non-natural amino acid, and this range may     encompass 1 or 4 residues; see specification as filed for detailed  description of substitutions, R-groups and preferred emb
  c-term may be amidated

SEQ ID NO: 516 - protein, 34 aa, Artificial Sequence; identical to SEQ ID NO: 318
  Description of Artificial Sequence: Synthetic peptide
  MOD_RES (4)..(4): Any L- or D-natural amino acid and any non-natural amino acid; see  specification as filed for detail ed description of substitutions, R-groups  and preferred embodiments
  MOD_RES (9)..(9): Any L- or D-natural amino acid and any non-natural amino acid; see  specification as filed for detail ed description of substitutions, R-groups  and preferred embodiments
  MOD_RES (11)..(11): Any L- or D-natural amino acid and any non-natural amino acid; see  specification as filed for detail ed description of substitutions, R-groups  and preferred embodiments
  MOD_RES (13)..(13): Any L- or D-natural amino acid and any non-natural amino acid; see  specification as filed for detail ed description of substitutions, R-groups  and preferred embodiments
  MOD_RES (18)..(21): Any L- or D-natural or non-natural amino acid, and this range may     encompass 1 or 4 residues; see specification as filed for detailed  description of substitutions, R-groups and preferred emb
  c-term may be amidated

SEQ ID NO: 517 - protein, 34 aa, Artificial Sequence; identical to SEQ ID NO: 319
  Description of Artificial Sequence: Synthetic peptide
  MOD_RES (5)..(5): Any L- or D-natural amino acid and any non-natural amino acid; see  specification as filed for detail ed description of substitutions, R-groups  and preferred embodiments
  MOD_RES (9)..(9): Any L- or D-natural amino acid and any non-natural amino acid; see  specification as filed for detail ed description of substitutions, R-groups  and preferred embodiments
  MOD_RES (11)..(11): Any L- or D-natural amino acid and any non-natural amino acid; see  specification as filed for detail ed description of substitutions, R-groups  and preferred embodiments
  MOD_RES (13)..(13): Any L- or D-natural amino acid and any non-natural amino acid; see  specification as filed for detail ed description of substitutions, R-groups  and preferred embodiments
  MOD_RES (18)..(21): Any L- or D-natural or non-natural amino acid, and this range may     encompass 1 or 4 residues; see specification as filed for detailed  description of substitutions, R-groups and preferred emb
  c-term may be amidated

SEQ ID NO: 518 - protein, 34 aa, Artificial Sequence; identical to SEQ ID NO: 320
  Description of Artificial Sequence: Synthetic peptide
  MOD_RES (6)..(6): Any L- or D-natural amino acid and any non-natural amino acid; see  specification as filed for detail ed description of substitutions, R-groups  and preferred embodiments
  MOD_RES (9)..(9): Any L- or D-natural amino acid and any non-natural amino acid; see  specification as filed for detail ed description of substitutions, R-groups  and preferred embodiments
  MOD_RES (11)..(11): Any L- or D-natural amino acid and any non-natural amino acid; see  specification as filed for detail ed description of substitutions, R-groups  and preferred embodiments
  MOD_RES (13)..(13): Any L- or D-natural amino acid and any non-natural amino acid; see  specification as filed for detail ed description of substitutions, R-groups  and preferred embodiments
  MOD_RES (18)..(21): Any L- or D-natural or non-natural amino acid, and this range may     encompass 1 or 4 residues; see specification as filed for detailed  description of substitutions, R-groups and preferred emb
  c-term may be amidated

SEQ ID NO: 519 - protein, 34 aa, Artificial Sequence; identical to SEQ ID NO: 321
  Description of Artificial Sequence: Synthetic peptide
  MOD_RES (7)..(7): Any L- or D-natural amino acid and any non-natural amino acid; see  specification as filed for detail ed description of substitutions, R-groups  and preferred embodiments
  MOD_RES (9)..(9): Any L- or D-natural amino acid and any non-natural amino acid; see  specification as filed for detail ed description of substitutions, R-groups  and preferred embodiments
  MOD_RES (11)..(11): Any L- or D-natural amino acid and any non-natural amino acid; see  specification as filed for detail ed description of substitutions, R-groups  and preferred embodiments
  MOD_RES (13)..(13): Any L- or D-natural amino acid and any non-natural amino acid; see  specification as filed for detail ed description of substitutions, R-groups  and preferred embodiments
  MOD_RES (18)..(21): Any L- or D-natural or non-natural amino acid, and this range may     encompass 1 or 4 residues; see specification as filed for detailed  description of substitutions, R-groups and preferred emb
  c-term may be amidated

SEQ ID NO: 520 - protein, 34 aa, Artificial Sequence; identical to SEQ ID NO: 322
  Description of Artificial Sequence: Synthetic peptide
  MOD_RES (8)..(9): Any L- or D-natural amino acid and any non-natural amino acid; see  specification as filed for detail ed description of substitutions, R-groups  and preferred embodiments
  MOD_RES (11)..(11): Any L- or D-natural amino acid and any non-natural amino acid; see  specification as filed for detail ed description of substitutions, R-groups  and preferred embodiments
  MOD_RES (13)..(13): Any L- or D-natural amino acid and any non-natural amino acid; see  specification as filed for detail ed description of substitutions, R-groups  and preferred embodiments
  MOD_RES (18)..(21): Any L- or D-natural or non-natural amino acid, and this range may     encompass 1 or 4 residues; see specification as filed for detailed  description of substitutions, R-groups and preferred emb
  c-term may be amidated

SEQ ID NO: 521 - protein, 34 aa, Artificial Sequence; identical to SEQ ID NO: 323
  Description of Artificial Sequence: Synthetic peptide
  MOD_RES (14)..(14): Any L- or D-natural amino acid and any non-natural amino acid; see  specification as filed for detail ed description of substitutions, R-groups  and preferred embodiments
  MOD_RES (18)..(21): Any L- or D-natural or non-natural amino acid, and this range may     encompass 1 or 4 residues; see specification as filed for detailed  description of substitutions, R-groups and preferred emb
  c-term may be amidated

SEQ ID NO: 522 - protein, 34 aa, Artificial Sequence; identical to SEQ ID NO: 324
  Description of Artificial Sequence: Synthetic peptide
  MOD_RES (1)..(1): Any L- or D-natural amino acid and any non-natural amino acid; see  specification as filed for detail ed description of substitutions, R-groups  and preferred embodiments
  MOD_RES (9)..(9): Any L- or D-natural amino acid and any non-natural amino acid; see  specification as filed for detail ed description of substitutions, R-groups  and preferred embodiments
  MOD_RES (11)..(11): Any L- or D-natural amino acid and any non-natural amino acid; see  specification as filed for detail ed description of substitutions, R-groups  and preferred embodiments
  MOD_RES (14)..(14): Any L- or D-natural amino acid and any non-natural amino acid; see  specification as filed for detail ed description of substitutions, R-groups  and preferred embodiments
  MOD_RES (18)..(21): Any L- or D-natural or non-natural amino acid, and this range may     encompass 1 or 4 residues; see specification as filed for detailed  description of substitutions, R-groups and preferred emb
  c-term may be amidated

SEQ ID NO: 523 - protein, 34 aa, Artificial Sequence; identical to SEQ ID NO: 325
  Description of Artificial Sequence: Synthetic peptide
  MOD_RES (2)..(2): Any L- or D-natural amino acid and any non-natural amino acid; see  specification as filed for detail ed description of substitutions, R-groups  and preferred embodiments
  MOD_RES (9)..(9): Any L- or D-natural amino acid and any non-natural amino acid; see  specification as filed for detail ed description of substitutions, R-groups  and preferred embodiments
  MOD_RES (11)..(11): Any L- or D-natural amino acid and any non-natural amino acid; see  specification as filed for detail ed description of substitutions, R-groups  and preferred embodiments
  MOD_RES (14)..(14): Any L- or D-natural amino acid and any non-natural amino acid; see  specification as filed for detail ed description of substitutions, R-groups  and preferred embodiments
  MOD_RES (18)..(21): Any L- or D-natural or non-natural amino acid, and this range may     encompass 1 or 4 residues; see specification as filed for detailed  description of substitutions, R-groups and preferred emb
  c-term may be amidated

SEQ ID NO: 524 - protein, 34 aa, Artificial Sequence; identical to SEQ ID NO: 326
  Description of Artificial Sequence: Synthetic peptide
  MOD_RES (3)..(3): Any L- or D-natural amino acid and any non-natural amino acid; see  specification as filed for detail ed description of substitutions, R-groups  and preferred embodiments
  MOD_RES (9)..(9): Any L- or D-natural amino acid and any non-natural amino acid; see  specification as filed for detail ed description of substitutions, R-groups  and preferred embodiments
  MOD_RES (11)..(11): Any L- or D-natural amino acid and any non-natural amino acid; see  specification as filed for detail ed description of substitutions, R-groups  and preferred embodiments
  MOD_RES (14)..(14): Any L- or D-natural amino acid and any non-natural amino acid; see  specification as filed for detail ed description of substitutions, R-groups  and preferred embodiments
  MOD_RES (18)..(21): Any L- or D-natural or non-natural amino acid, and this range may     encompass 1 or 4 residues; see specification as filed for detailed  description of substitutions, R-groups and preferred emb
  c-term may be amidated

SEQ ID NO: 525 - protein, 34 aa, Artificial Sequence; identical to SEQ ID NO: 327
  Description of Artificial Sequence: Synthetic peptide
  MOD_RES (4)..(4): Any L- or D-natural amino acid and any non-natural amino acid; see  specification as filed for detail ed description of substitutions, R-groups  and preferred embodiments
  MOD_RES (9)..(9): Any L- or D-natural amino acid and any non-natural amino acid; see  specification as filed for detail ed description of substitutions, R-groups  and preferred embodiments
  MOD_RES (11)..(11): Any L- or D-natural amino acid and any non-natural amino acid; see  specification as filed for detail ed description of substitutions, R-groups  and preferred embodiments
  MOD_RES (14)..(14): Any L- or D-natural amino acid and any non-natural amino acid; see  specification as filed for detail ed description of substitutions, R-groups  and preferred embodiments
  MOD_RES (18)..(21): Any L- or D-natural or non-natural amino acid, and this range may     encompass 1 or 4 residues; see specification as filed for detailed  description of substitutions, R-groups and preferred emb
  c-term may be amidated

SEQ ID NO: 526 - protein, 34 aa, Artificial Sequence; identical to SEQ ID NO: 328
  Description of Artificial Sequence: Synthetic peptide
  MOD_RES (5)..(5): Any L- or D-natural amino acid and any non-natural amino acid; see  specification as filed for detail ed description of substitutions, R-groups  and preferred embodiments
  MOD_RES (9)..(9): Any L- or D-natural amino acid and any non-natural amino acid; see  specification as filed for detail ed description of substitutions, R-groups  and preferred embodiments
  MOD_RES (11)..(11): Any L- or D-natural amino acid and any non-natural amino acid; see  specification as filed for detail ed description of substitutions, R-groups  and preferred embodiments
  MOD_RES (14)..(14): Any L- or D-natural amino acid and any non-natural amino acid; see  specification as filed for detail ed description of substitutions, R-groups  and preferred embodiments
  MOD_RES (18)..(21): Any L- or D-natural or non-natural amino acid, and this range may     encompass 1 or 4 residues; see specification as filed for detailed  description of substitutions, R-groups and preferred emb
  c-term may be amidated

SEQ ID NO: 527 - protein, 34 aa, Artificial Sequence; identical to SEQ ID NO: 329
  Description of Artificial Sequence: Synthetic peptide
  MOD_RES (6)..(6): Any L- or D-natural amino acid and any non-natural amino acid; see  specification as filed for detail ed description of substitutions, R-groups  and preferred embodiments
  MOD_RES (9)..(9): Any L- or D-natural amino acid and any non-natural amino acid; see  specification as filed for detail ed description of substitutions, R-groups  and preferred embodiments
  MOD_RES (11)..(11): Any L- or D-natural amino acid and any non-natural amino acid; see  specification as filed for detail ed description of substitutions, R-groups  and preferred embodiments
  MOD_RES (14)..(14): Any L- or D-natural amino acid and any non-natural amino acid; see  specification as filed for detail ed description of substitutions, R-groups  and preferred embodiments
  MOD_RES (18)..(21): Any L- or D-natural or non-natural amino acid, and this range may     encompass 1 or 4 residues; see specification as filed for detailed  description of substitutions, R-groups and preferred emb
  c-term may be amidated

SEQ ID NO: 528 - protein, 34 aa, Artificial Sequence; identical to SEQ ID NO: 330
  Description of Artificial Sequence: Synthetic peptide
  MOD_RES (7)..(7): Any L- or D-natural amino acid and any non-natural amino acid; see  specification as filed for detail ed description of substitutions, R-groups  and preferred embodiments
  MOD_RES (9)..(9): Any L- or D-natural amino acid and any non-natural amino acid; see  specification as filed for detail ed description of substitutions, R-groups  and preferred embodiments
  MOD_RES (11)..(11): Any L- or D-natural amino acid and any non-natural amino acid; see  specification as filed for detail ed description of substitutions, R-groups  and preferred embodiments
  MOD_RES (14)..(14): Any L- or D-natural amino acid and any non-natural amino acid; see  specification as filed for detail ed description of substitutions, R-groups  and preferred embodiments
  MOD_RES (18)..(21): Any L- or D-natural or non-natural amino acid, and this range may     encompass 1 or 4 residues; see specification as filed for detailed  description of substitutions, R-groups and preferred emb
  c-term may be amidated

SEQ ID NO: 529 - protein, 34 aa, Artificial Sequence; identical to SEQ ID NO: 331
  Description of Artificial Sequence: Synthetic peptide
  MOD_RES (8)..(9): Any L- or D-natural amino acid and any non-natural amino acid; see  specification as filed for detail ed description of substitutions, R-groups  and preferred embodiments
  MOD_RES (11)..(11): Any L- or D-natural amino acid and any non-natural amino acid; see  specification as filed for detail ed description of substitutions, R-groups  and preferred embodiments
  MOD_RES (14)..(14): Any L- or D-natural amino acid and any non-natural amino acid; see  specification as filed for detail ed description of substitutions, R-groups  and preferred embodiments
  MOD_RES (18)..(21): Any L- or D-natural or non-natural amino acid, and this range may     encompass 1 or 4 residues; see specification as filed for detailed  description of substitutions, R-groups and preferred emb
  c-term may be amidated

SEQ ID NO: 530 - protein, 34 aa, Artificial Sequence; identical to SEQ ID NO: 332
  Description of Artificial Sequence: Synthetic peptide
  MOD_RES (16)..(16): Any L- or D-natural amino acid and any non-natural amino acid; see  specification as filed for detail ed description of substitutions, R-groups  and preferred embodiments
  MOD_RES (18)..(21): Any L- or D-natural or non-natural amino acid, and this range may     encompass 1 or 4 residues; see specification as filed for detailed  description of substitutions, R-groups and preferred emb
  c-term may be amidated

SEQ ID NO: 531 - protein, 34 aa, Artificial Sequence; identical to SEQ ID NO: 333
  Description of Artificial Sequence: Synthetic peptide
  MOD_RES (1)..(1): Any L- or D-natural amino acid and any non-natural amino acid; see  specification as filed for detail ed description of substitutions, R-groups  and preferred embodiments
  MOD_RES (9)..(9): Any L- or D-natural amino acid and any non-natural amino acid; see  specification as filed for detail ed description of substitutions, R-groups  and preferred embodiments
  MOD_RES (11)..(11): Any L- or D-natural amino acid and any non-natural amino acid; see  specification as filed for detail ed description of substitutions, R-groups  and preferred embodiments
  MOD_RES (16)..(16): Any L- or D-natural amino acid and any non-natural amino acid; see  specification as filed for detail ed description of substitutions, R-groups  and preferred embodiments
  MOD_RES (18)..(21): Any L- or D-natural or non-natural amino acid, and this range may     encompass 1 or 4 residues; see specification as filed for detailed  description of substitutions, R-groups and preferred emb
  c-term may be amidated

SEQ ID NO: 532 - protein, 34 aa, Artificial Sequence; identical to SEQ ID NO: 334
  Description of Artificial Sequence: Synthetic peptide
  MOD_RES (2)..(2): Any L- or D-natural amino acid and any non-natural amino acid; see  specification as filed for detail ed description of substitutions, R-groups  and preferred embodiments
  MOD_RES (9)..(9): Any L- or D-natural amino acid and any non-natural amino acid; see  specification as filed for detail ed description of substitutions, R-groups  and preferred embodiments
  MOD_RES (11)..(11): Any L- or D-natural amino acid and any non-natural amino acid; see  specification as filed for detail ed description of substitutions, R-groups  and preferred embodiments
  MOD_RES (16)..(16): Any L- or D-natural amino acid and any non-natural amino acid; see  specification as filed for detail ed description of substitutions, R-groups  and preferred embodiments
  MOD_RES (18)..(21): Any L- or D-natural or non-natural amino acid, and this range may     encompass 1 or 4 residues; see specification as filed for detailed  description of substitutions, R-groups and preferred emb
  c-term may be amidated

SEQ ID NO: 533 - protein, 34 aa, Artificial Sequence; identical to SEQ ID NO: 335
  Description of Artificial Sequence: Synthetic peptide
  MOD_RES (3)..(3): Any L- or D-natural amino acid and any non-natural amino acid; see  specification as filed for detail ed description of substitutions, R-groups  and preferred embodiments
  MOD_RES (9)..(9): Any L- or D-natural amino acid and any non-natural amino acid; see  specification as filed for detail ed description of substitutions, R-groups  and preferred embodiments
  MOD_RES (11)..(11): Any L- or D-natural amino acid and any non-natural amino acid; see  specification as filed for detail ed description of substitutions, R-groups  and preferred embodiments
  MOD_RES (16)..(16): Any L- or D-natural amino acid and any non-natural amino acid; see  specification as filed for detail ed description of substitutions, R-groups  and preferred embodiments
  MOD_RES (18)..(21): Any L- or D-natural or non-natural amino acid, and this range may     encompass 1 or 4 residues; see specification as filed for detailed  description of substitutions, R-groups and preferred emb
  c-term may be amidated

SEQ ID NO: 534 - protein, 34 aa, Artificial Sequence; identical to SEQ ID NO: 336
  Description of Artificial Sequence: Synthetic peptide
  MOD_RES (4)..(4): Any L- or D-natural amino acid and any non-natural amino acid; see  specification as filed for detail ed description of substitutions, R-groups  and preferred embodiments
  MOD_RES (9)..(9): Any L- or D-natural amino acid and any non-natural amino acid; see  specification as filed for detail ed description of substitutions, R-groups  and preferred embodiments
  MOD_RES (11)..(11): Any L- or D-natural amino acid and any non-natural amino acid; see  specification as filed for detail ed description of substitutions, R-groups  and preferred embodiments
  MOD_RES (16)..(16): Any L- or D-natural amino acid and any non-natural amino acid; see  specification as filed for detail ed description of substitutions, R-groups  and preferred embodiments
  MOD_RES (18)..(21): Any L- or D-natural or non-natural amino acid, and this range may     encompass 1 or 4 residues; see specification as filed for detailed  description of substitutions, R-groups and preferred emb
  c-term may be amidated

SEQ ID NO: 535 - protein, 34 aa, Artificial Sequence; identical to SEQ ID NO: 337
  Description of Artificial Sequence: Synthetic peptide
  MOD_RES (5)..(5): Any L- or D-natural amino acid and any non-natural amino acid; see  specification as filed for detail ed description of substitutions, R-groups  and preferred embodiments
  MOD_RES (9)..(9): Any L- or D-natural amino acid and any non-natural amino acid; see  specification as filed for detail ed description of substitutions, R-groups  and preferred embodiments
  MOD_RES (11)..(11): Any L- or D-natural amino acid and any non-natural amino acid; see  specification as filed for detail ed description of substitutions, R-groups  and preferred embodiments
  MOD_RES (16)..(16): Any L- or D-natural amino acid and any non-natural amino acid; see  specification as filed for detail ed description of substitutions, R-groups  and preferred embodiments
  MOD_RES (18)..(21): Any L- or D-natural or non-natural amino acid, and this range may     encompass 1 or 4 residues; see specification as filed for detailed  description of substitutions, R-groups and preferred emb
  c-term may be amidated

SEQ ID NO: 536 - protein, 34 aa, Artificial Sequence; identical to SEQ ID NO: 338
  Description of Artificial Sequence: Synthetic peptide
  MOD_RES (6)..(6): Any L- or D-natural amino acid and any non-natural amino acid; see  specification as filed for detail ed description of substitutions, R-groups  and preferred embodiments
  MOD_RES (9)..(9): Any L- or D-natural amino acid and any non-natural amino acid; see  specification as filed for detail ed description of substitutions, R-groups  and preferred embodiments
  MOD_RES (11)..(11): Any L- or D-natural amino acid and any non-natural amino acid; see  specification as filed for detail ed description of substitutions, R-groups  and preferred embodiments
  MOD_RES (16)..(16): Any L- or D-natural amino acid and any non-natural amino acid; see  specification as filed for detail ed description of substitutions, R-groups  and preferred embodiments
  MOD_RES (18)..(21): Any L- or D-natural or non-natural amino acid, and this range may     encompass 1 or 4 residues; see specification as filed for detailed  description of substitutions, R-groups and preferred emb
  c-term may be amidated

SEQ ID NO: 537 - protein, 34 aa, Artificial Sequence; identical to SEQ ID NO: 339
  Description of Artificial Sequence: Synthetic peptide
  MOD_RES (7)..(7): Any L- or D-natural amino acid and any non-natural amino acid; see  specification as filed for detail ed description of substitutions, R-groups  and preferred embodiments
  MOD_RES (9)..(9): Any L- or D-natural amino acid and any non-natural amino acid; see  specification as filed for detail ed description of substitutions, R-groups  and preferred embodiments
  MOD_RES (11)..(11): Any L- or D-natural amino acid and any non-natural amino acid; see  specification as filed for detail ed description of substitutions, R-groups  and preferred embodiments
  MOD_RES (16)..(16): Any L- or D-natural amino acid and any non-natural amino acid; see  specification as filed for detail ed description of substitutions, R-groups  and preferred embodiments
  MOD_RES (18)..(21): Any L- or D-natural or non-natural amino acid, and this range may     encompass 1 or 4 residues; see specification as filed for detailed  description of substitutions, R-groups and preferred emb
  c-term may be amidated

SEQ ID NO: 538 - protein, 34 aa, Artificial Sequence; identical to SEQ ID NO: 340
  Description of Artificial Sequence: Synthetic peptide
  MOD_RES (8)..(9): Any L- or D-natural amino acid and any non-natural amino acid; see  specification as filed for detail ed description of substitutions, R-groups  and preferred embodiments
  MOD_RES (11)..(11): Any L- or D-natural amino acid and any non-natural amino acid; see  specification as filed for detail ed description of substitutions, R-groups  and preferred embodiments
  MOD_RES (16)..(16): Any L- or D-natural amino acid and any non-natural amino acid; see  specification as filed for detail ed description of substitutions, R-groups  and preferred embodiments
  MOD_RES (18)..(21): Any L- or D-natural or non-natural amino acid, and this range may     encompass 1 or 4 residues; see specification as filed for detailed  description of substitutions, R-groups and preferred emb
  c-term may be amidated

SEQ ID NO: 539 - protein, 34 aa, Artificial Sequence; identical to SEQ ID NO: 341
  Description of Artificial Sequence: Synthetic peptide
  MOD_RES (17)..(17): Any L- or D-natural amino acid and any non-natural amino acid; see  specification as filed for detail ed description of substitutions, R-groups  and preferred embodiments
  MOD_RES (18)..(21): Any L- or D-natural or non-natural amino acid, and this range may     encompass 1 or 4 residues; see specification as filed for detailed  description of substitutions, R-groups and preferred emb
  c-term may be amidated

SEQ ID NO: 540 - protein, 34 aa, Artificial Sequence; identical to SEQ ID NO: 342
  Description of Artificial Sequence: Synthetic peptide
  MOD_RES (1)..(1): Any L- or D-natural amino acid and any non-natural amino acid; see  specification as filed for detail ed description of substitutions, R-groups  and preferred embodiments
  MOD_RES (9)..(9): Any L- or D-natural amino acid and any non-natural amino acid; see  specification as filed for detail ed description of substitutions, R-groups  and preferred embodiments
  MOD_RES (11)..(11): Any L- or D-natural amino acid and any non-natural amino acid; see  specification as filed for detail ed description of substitutions, R-groups  and preferred embodiments
  MOD_RES (17)..(17): Any L- or D-natural amino acid and any non-natural amino acid; see  specification as filed for detail ed description of substitutions, R-groups  and preferred embodiments
  MOD_RES (18)..(21): Any L- or D-natural or non-natural amino acid, and this range may     encompass 1 or 4 residues; see specification as filed for detailed  description of substitutions, R-groups and preferred emb
  c-term may be amidated

SEQ ID NO: 541 - protein, 34 aa, Artificial Sequence; identical to SEQ ID NO: 343
  Description of Artificial Sequence: Synthetic peptide
  MOD_RES (2)..(2): Any L- or D-natural amino acid and any non-natural amino acid; see  specification as filed for detail ed description of substitutions, R-groups  and preferred embodiments
  MOD_RES (9)..(9): Any L- or D-natural amino acid and any non-natural amino acid; see  specification as filed for detail ed description of substitutions, R-groups  and preferred embodiments
  MOD_RES (11)..(11): Any L- or D-natural amino acid and any non-natural amino acid; see  specification as filed for detail ed description of substitutions, R-groups  and preferred embodiments
  MOD_RES (17)..(17): Any L- or D-natural amino acid and any non-natural amino acid; see  specification as filed for detail ed description of substitutions, R-groups  and preferred embodiments
  MOD_RES (18)..(21): Any L- or D-natural or non-natural amino acid, and this range may     encompass 1 or 4 residues; see specification as filed for detailed  description of substitutions, R-groups and preferred emb
  c-term may be amidated

SEQ ID NO: 542 - protein, 34 aa, Artificial Sequence; identical to SEQ ID NO: 344
  Description of Artificial Sequence: Synthetic peptide
  MOD_RES (3)..(3): Any L- or D-natural amino acid and any non-natural amino acid; see  specification as filed for detail ed description of substitutions, R-groups  and preferred embodiments
  MOD_RES (9)..(9): Any L- or D-natural amino acid and any non-natural amino acid; see  specification as filed for detail ed description of substitutions, R-groups  and preferred embodiments
  MOD_RES (11)..(11): Any L- or D-natural amino acid and any non-natural amino acid; see  specification as filed for detail ed description of substitutions, R-groups  and preferred embodiments
  MOD_RES (17)..(17): Any L- or D-natural amino acid and any non-natural amino acid; see  specification as filed for detail ed description of substitutions, R-groups  and preferred embodiments
  MOD_RES (18)..(21): Any L- or D-natural or non-natural amino acid, and this range may     encompass 1 or 4 residues; see specification as filed for detailed  description of substitutions, R-groups and preferred emb
  c-term may be amidated

SEQ ID NO: 543 - protein, 34 aa, Artificial Sequence; identical to SEQ ID NO: 345
  Description of Artificial Sequence: Synthetic peptide
  MOD_RES (4)..(4): Any L- or D-natural amino acid and any non-natural amino acid; see  specification as filed for detail ed description of substitutions, R-groups  and preferred embodiments
  MOD_RES (9)..(9): Any L- or D-natural amino acid and any non-natural amino acid; see  specification as filed for detail ed description of substitutions, R-groups  and preferred embodiments
  MOD_RES (11)..(11): Any L- or D-natural amino acid and any non-natural amino acid; see  specification as filed for detail ed description of substitutions, R-groups  and preferred embodiments
  MOD_RES (17)..(17): Any L- or D-natural amino acid and any non-natural amino acid; see  specification as filed for detail ed description of substitutions, R-groups  and preferred embodiments
  MOD_RES (18)..(21): Any L- or D-natural or non-natural amino acid, and this range may     encompass 1 or 4 residues; see specification as filed for detailed  description of substitutions, R-groups and preferred emb
  c-term may be amidated

SEQ ID NO: 544 - protein, 34 aa, Artificial Sequence; identical to SEQ ID NO: 346
  Description of Artificial Sequence: Synthetic peptide
  MOD_RES (5)..(5): Any L- or D-natural amino acid and any non-natural amino acid; see  specification as filed for detail ed description of substitutions, R-groups  and preferred embodiments
  MOD_RES (9)..(9): Any L- or D-natural amino acid and any non-natural amino acid; see  specification as filed for detail ed description of substitutions, R-groups  and preferred embodiments
  MOD_RES (11)..(11): Any L- or D-natural amino acid and any non-natural amino acid; see  specification as filed for detail ed description of substitutions, R-groups  and preferred embodiments
  MOD_RES (17)..(17): Any L- or D-natural amino acid and any non-natural amino acid; see  specification as filed for detail ed description of substitutions, R-groups  and preferred embodiments
  MOD_RES (18)..(21): Any L- or D-natural or non-natural amino acid, and this range may     encompass 1 or 4 residues; see specification as filed for detailed  description of substitutions, R-groups and preferred emb
  c-term may be amidated

SEQ ID NO: 545 - protein, 34 aa, Artificial Sequence; identical to SEQ ID NO: 347
  Description of Artificial Sequence: Synthetic peptide
  MOD_RES (6)..(6): Any L- or D-natural amino acid and any non-natural amino acid; see  specification as filed for detail ed description of substitutions, R-groups  and preferred embodiments
  MOD_RES (9)..(9): Any L- or D-natural amino acid and any non-natural amino acid; see  specification as filed for detail ed description of substitutions, R-groups  and preferred embodiments
  MOD_RES (11)..(11): Any L- or D-natural amino acid and any non-natural amino acid; see  specification as filed for detail ed description of substitutions, R-groups  and preferred embodiments
  MOD_RES (17)..(17): Any L- or D-natural amino acid and any non-natural amino acid; see  specification as filed for detail ed description of substitutions, R-groups  and preferred embodiments
  MOD_RES (18)..(21): Any L- or D-natural or non-natural amino acid, and this range may     encompass 1 or 4 residues; see specification as filed for detailed  description of substitutions, R-groups and preferred emb
  c-term may be amidated

SEQ ID NO: 546 - protein, 34 aa, Artificial Sequence; identical to SEQ ID NO: 348
  Description of Artificial Sequence: Synthetic peptide
  MOD_RES (7)..(7): Any L- or D-natural amino acid and any non-natural amino acid; see  specification as filed for detail ed description of substitutions, R-groups  and preferred embodiments
  MOD_RES (9)..(9): Any L- or D-natural amino acid and any non-natural amino acid; see  specification as filed for detail ed description of substitutions, R-groups  and preferred embodiments
  MOD_RES (11)..(11): Any L- or D-natural amino acid and any non-natural amino acid; see  specification as filed for detail ed description of substitutions, R-groups  and preferred embodiments
  MOD_RES (17)..(17): Any L- or D-natural amino acid and any non-natural amino acid; see  specification as filed for detail ed description of substitutions, R-groups  and preferred embodiments
  MOD_RES (18)..(21): Any L- or D-natural or non-natural amino acid, and this range may     encompass 1 or 4 residues; see specification as filed for detailed  description of substitutions, R-groups and preferred emb
  c-term may be amidated

SEQ ID NO: 547 - skipped

SEQ ID NO: 548 - protein, 34 aa, Artificial Sequence; identical to SEQ ID NO: 349
  Description of Artificial Sequence: Synthetic peptide
  MOD_RES (8)..(9): Any L- or D-natural amino acid and any non-natural amino acid; see  specification as filed for detail ed description of substitutions, R-groups  and preferred embodiments
  MOD_RES (11)..(11): Any L- or D-natural amino acid and any non-natural amino acid; see  specification as filed for detail ed description of substitutions, R-groups  and preferred embodiments
  MOD_RES (17)..(17): Any L- or D-natural amino acid and any non-natural amino acid; see  specification as filed for detail ed description of substitutions, R-groups  and preferred embodiments
  MOD_RES (18)..(21): Any L- or D-natural or non-natural amino acid, and this range may     encompass 1 or 4 residues; see specification as filed for detailed  description of substitutions, R-groups and preferred emb
  c-term may be amidated

SEQ ID NO: 549 - protein, 31 aa, Artificial Sequence; identical to SEQ ID NO: 224
  Description of Artificial Sequence: Synthetic peptide
  MOD_RES (15)..(18): Any L- or D-natural or non-natural amino acid, and this range may     encompass 1 or 4 residues; see specification as filed for detailed  description of substitutions, R-groups and preferred emb
  c-term may be amidated

SEQ ID NO: 550 - protein, 31 aa, Artificial Sequence; identical to SEQ ID NO: 225
  Description of Artificial Sequence: Synthetic peptide
  MOD_RES (1)..(1): Any L- or D-natural amino acid and any non-natural amino acid; see  specification as filed for detail ed description of substitutions, R-groups  and preferred embodiments
  MOD_RES (9)..(9): Any L- or D-natural amino acid and any non-natural amino acid; see  specification as filed for detail ed description of substitutions, R-groups  and preferred embodiments
  MOD_RES (11)..(11): Any L- or D-natural amino acid and any non-natural amino acid; see  specification as filed for detail ed description of substitutions, R-groups  and preferred embodiments
  MOD_RES (15)..(18): Any L- or D-natural or non-natural amino acid, and this range may     encompass 1 or 4 residues; see specification as filed for detailed  description of substitutions, R-groups and preferred emb
  c-term may be amidated

SEQ ID NO: 551 - protein, 31 aa, Artificial Sequence; identical to SEQ ID NO: 226
  Description of Artificial Sequence: Synthetic peptide
  MOD_RES (2)..(2): Any L- or D-natural amino acid and any non-natural amino acid; see  specification as filed for detail ed description of substitutions, R-groups  and preferred embodiments
  MOD_RES (9)..(9): Any L- or D-natural amino acid and any non-natural amino acid; see  specification as filed for detail ed description of substitutions, R-groups  and preferred embodiments
  MOD_RES (11)..(11): Any L- or D-natural amino acid and any non-natural amino acid; see  specification as filed for detail ed description of substitutions, R-groups  and preferred embodiments
  MOD_RES (15)..(18): Any L- or D-natural or non-natural amino acid, and this range may     encompass 1 or 4 residues; see specification as filed for detailed  description of substitutions, R-groups and preferred emb
  c-term may be amidated

SEQ ID NO: 552 - protein, 31 aa, Artificial Sequence; identical to SEQ ID NO: 227
  Description of Artificial Sequence: Synthetic peptide
  MOD_RES (3)..(3): Any L- or D-natural amino acid and any non-natural amino acid; see  specification as filed for detail ed description of substitutions, R-groups  and preferred embodiments
  MOD_RES (9)..(9): Any L- or D-natural amino acid and any non-natural amino acid; see  specification as filed for detail ed description of substitutions, R-groups  and preferred embodiments
  MOD_RES (11)..(11): Any L- or D-natural amino acid and any non-natural amino acid; see  specification as filed for detail ed description of substitutions, R-groups  and preferred embodiments
  MOD_RES (15)..(18): Any L- or D-natural or non-natural amino acid, and this range may     encompass 1 or 4 residues; see specification as filed for detailed  description of substitutions, R-groups and preferred emb
  c-term may be amidated

SEQ ID NO: 553 - protein, 31 aa, Artificial Sequence; identical to SEQ ID NO: 228
  Description of Artificial Sequence: Synthetic peptide
  MOD_RES (4)..(4): Any L- or D-natural amino acid and any non-natural amino acid; see  specification as filed for detail ed description of substitutions, R-groups  and preferred embodiments
  MOD_RES (9)..(9): Any L- or D-natural amino acid and any non-natural amino acid; see  specification as filed for detail ed description of substitutions, R-groups  and preferred embodiments
  MOD_RES (11)..(11): Any L- or D-natural amino acid and any non-natural amino acid; see  specification as filed for detail ed description of substitutions, R-groups  and preferred embodiments
  MOD_RES (15)..(18): Any L- or D-natural or non-natural amino acid, and this range may     encompass 1 or 4 residues; see specification as filed for detailed  description of substitutions, R-groups and preferred emb
  c-term may be amidated

SEQ ID NO: 554 - protein, 31 aa, Artificial Sequence; identical to SEQ ID NO: 229
  Description of Artificial Sequence: Synthetic peptide
  MOD_RES (5)..(5): Any L- or D-natural amino acid and any non-natural amino acid; see  specification as filed for detail ed description of substitutions, R-groups  and preferred embodiments
  MOD_RES (9)..(9): Any L- or D-natural amino acid and any non-natural amino acid; see  specification as filed for detail ed description of substitutions, R-groups  and preferred embodiments
  MOD_RES (11)..(11): Any L- or D-natural amino acid and any non-natural amino acid; see  specification as filed for detail ed description of substitutions, R-groups  and preferred embodiments
  MOD_RES (15)..(18): Any L- or D-natural or non-natural amino acid, and this range may     encompass 1 or 4 residues; see specification as filed for detailed  description of substitutions, R-groups and preferred emb
  c-term may be amidated

SEQ ID NO: 555 - protein, 31 aa, Artificial Sequence; identical to SEQ ID NO: 230
  Description of Artificial Sequence: Synthetic peptide
  MOD_RES (6)..(6): Any L- or D-natural amino acid and any non-natural amino acid; see  specification as filed for detail ed description of substitutions, R-groups  and preferred embodiments
  MOD_RES (9)..(9): Any L- or D-natural amino acid and any non-natural amino acid; see  specification as filed for detail ed description of substitutions, R-groups  and preferred embodiments
  MOD_RES (11)..(11): Any L- or D-natural amino acid and any non-natural amino acid; see  specification as filed for detail ed description of substitutions, R-groups  and preferred embodiments
  MOD_RES (15)..(18): Any L- or D-natural or non-natural amino acid, and this range may     encompass 1 or 4 residues; see specification as filed for detailed  description of substitutions, R-groups and preferred emb
  c-term may be amidated

SEQ ID NO: 556 - protein, 31 aa, Artificial Sequence; identical to SEQ ID NO: 231
  Description of Artificial Sequence: Synthetic peptide
  MOD_RES (7)..(7): Any L- or D-natural amino acid and any non-natural amino acid; see  specification as filed for detail ed description of substitutions, R-groups  and preferred embodiments
  MOD_RES (9)..(9): Any L- or D-natural amino acid and any non-natural amino acid; see  specification as filed for detail ed description of substitutions, R-groups  and preferred embodiments
  MOD_RES (11)..(11): Any L- or D-natural amino acid and any non-natural amino acid; see  specification as filed for detail ed description of substitutions, R-groups  and preferred embodiments
  MOD_RES (15)..(18): Any L- or D-natural or non-natural amino acid, and this range may     encompass 1 or 4 residues; see specification as filed for detailed  description of substitutions, R-groups and preferred emb
  c-term may be amidated

SEQ ID NO: 557 - protein, 31 aa, Artificial Sequence; identical to SEQ ID NO: 232
  Description of Artificial Sequence: Synthetic peptide
  MOD_RES (8)..(9): Any L- or D-natural amino acid and any non-natural amino acid; see  specification as filed for detail ed description of substitutions, R-groups  and preferred embodiments
  MOD_RES (11)..(11): Any L- or D-natural amino acid and any non-natural amino acid; see  specification as filed for detail ed description of substitutions, R-groups  and preferred embodiments
  MOD_RES (15)..(18): Any L- or D-natural or non-natural amino acid, and this range may     encompass 1 or 4 residues; see specification as filed for detailed  description of substitutions, R-groups and preferred emb
  c-term may be amidated

SEQ ID NO: 558 - protein, 31 aa, Artificial Sequence; identical to SEQ ID NO: 233
  Description of Artificial Sequence: Synthetic peptide
  MOD_RES (12)..(12): Any L- or D-natural amino acid and any non-natural amino acid; see  specification as filed for detail ed description of substitutions, R-groups  and preferred embodiments
  MOD_RES (15)..(18): Any L- or D-natural or non-natural amino acid, and this range may     encompass 1 or 4 residues; see specification as filed for detailed  description of substitutions, R-groups and preferred emb
  c-term may be amidated

SEQ ID NO: 559 - protein, 31 aa, Artificial Sequence; identical to SEQ ID NO: 234
  Description of Artificial Sequence: Synthetic peptide
  MOD_RES (1)..(1): Any L- or D-natural amino acid and any non-natural amino acid; see  specification as filed for detail ed description of substitutions, R-groups  and preferred embodiments
  MOD_RES (9)..(9): Any L- or D-natural amino acid and any non-natural amino acid; see  specification as filed for detail ed description of substitutions, R-groups  and preferred embodiments
  MOD_RES (11)..(12): Any L- or D-natural amino acid and any non-natural amino acid; see  specification as filed for detail ed description of substitutions, R-groups  and preferred embodiments
  MOD_RES (15)..(18): Any L- or D-natural or non-natural amino acid, and this range may     encompass 1 or 4 residues; see specification as filed for detailed  description of substitutions, R-groups and preferred emb
  c-term may be amidated

SEQ ID NO: 560 - protein, 31 aa, Artificial Sequence; identical to SEQ ID NO: 235
  Description of Artificial Sequence: Synthetic peptide
  MOD_RES (2)..(2): Any L- or D-natural amino acid and any non-natural amino acid; see  specification as filed for detail ed description of substitutions, R-groups  and preferred embodiments
  MOD_RES (9)..(9): Any L- or D-natural amino acid and any non-natural amino acid; see  specification as filed for detail ed description of substitutions, R-groups  and preferred embodiments
  MOD_RES (11)..(12): Any L- or D-natural amino acid and any non-natural amino acid; see  specification as filed for detail ed description of substitutions, R-groups  and preferred embodiments
  MOD_RES (15)..(18): Any L- or D-natural or non-natural amino acid, and this range may     encompass 1 or 4 residues; see specification as filed for detailed  description of substitutions, R-groups and preferred emb
  c-term may be amidated

SEQ ID NO: 561 - protein, 31 aa, Artificial Sequence; identical to SEQ ID NO: 236
  Description of Artificial Sequence: Synthetic peptide
  MOD_RES (3)..(3): Any L- or D-natural amino acid and any non-natural amino acid; see  specification as filed for detail ed description of substitutions, R-groups  and preferred embodiments
  MOD_RES (9)..(9): Any L- or D-natural amino acid and any non-natural amino acid; see  specification as filed for detail ed description of substitutions, R-groups  and preferred embodiments
  MOD_RES (11)..(12): Any L- or D-natural amino acid and any non-natural amino acid; see  specification as filed for detail ed description of substitutions, R-groups  and preferred embodiments
  MOD_RES (15)..(18): Any L- or D-natural or non-natural amino acid, and this range may     encompass 1 or 4 residues; see specification as filed for detailed  description of substitutions, R-groups and preferred emb
  c-term may be amidated

SEQ ID NO: 562 - protein, 31 aa, Artificial Sequence; identical to SEQ ID NO: 237
  Description of Artificial Sequence: Synthetic peptide
  MOD_RES (4)..(4): Any L- or D-natural amino acid and any non-natural amino acid; see  specification as filed for detail ed description of substitutions, R-groups  and preferred embodiments
  MOD_RES (9)..(9): Any L- or D-natural amino acid and any non-natural amino acid; see  specification as filed for detail ed description of substitutions, R-groups  and preferred embodiments
  MOD_RES (11)..(12): Any L- or D-natural amino acid and any non-natural amino acid; see  specification as filed for detail ed description of substitutions, R-groups  and preferred embodiments
  MOD_RES (15)..(18): Any L- or D-natural or non-natural amino acid, and this range may     encompass 1 or 4 residues; see specification as filed for detailed  description of substitutions, R-groups and preferred emb
  c-term may be amidated

SEQ ID NO: 563 - protein, 31 aa, Artificial Sequence; identical to SEQ ID NO: 238
  Description of Artificial Sequence: Synthetic peptide
  MOD_RES (5)..(5): Any L- or D-natural amino acid and any non-natural amino acid; see  specification as filed for detail ed description of substitutions, R-groups  and preferred embodiments
  MOD_RES (9)..(9): Any L- or D-natural amino acid and any non-natural amino acid; see  specification as filed for detail ed description of substitutions, R-groups  and preferred embodiments
  MOD_RES (11)..(12): Any L- or D-natural amino acid and any non-natural amino acid; see  specification as filed for detail ed description of substitutions, R-groups  and preferred embodiments
  MOD_RES (15)..(18): Any L- or D-natural or non-natural amino acid, and this range may     encompass 1 or 4 residues; see specification as filed for detailed  description of substitutions, R-groups and preferred emb
  c-term may be amidated

SEQ ID NO: 564 - protein, 31 aa, Artificial Sequence; identical to SEQ ID NO: 239
  Description of Artificial Sequence: Synthetic peptide
  MOD_RES (6)..(6): Any L- or D-natural amino acid and any non-natural amino acid; see  specification as filed for detail ed description of substitutions, R-groups  and preferred embodiments
  MOD_RES (9)..(9): Any L- or D-natural amino acid and any non-natural amino acid; see  specification as filed for detail ed description of substitutions, R-groups  and preferred embodiments
  MOD_RES (11)..(12): Any L- or D-natural amino acid and any non-natural amino acid; see  specification as filed for detail ed description of substitutions, R-groups  and preferred embodiments
  MOD_RES (15)..(18): Any L- or D-natural or non-natural amino acid, and this range may     encompass 1 or 4 residues; see specification as filed for detailed  description of substitutions, R-groups and preferred emb
  c-term may be amidated

SEQ ID NO: 565 - protein, 31 aa, Artificial Sequence; identical to SEQ ID NO: 240
  Description of Artificial Sequence: Synthetic peptide
  MOD_RES (7)..(7): Any L- or D-natural amino acid and any non-natural amino acid; see  specification as filed for detail ed description of substitutions, R-groups  and preferred embodiments
  MOD_RES (9)..(9): Any L- or D-natural amino acid and any non-natural amino acid; see  specification as filed for detail ed description of substitutions, R-groups  and preferred embodiments
  MOD_RES (11)..(12): Any L- or D-natural amino acid and any non-natural amino acid; see  specification as filed for detail ed description of substitutions, R-groups  and preferred embodiments
  MOD_RES (15)..(18): Any L- or D-natural or non-natural amino acid, and this range may     encompass 1 or 4 residues; see specification as filed for detailed  description of substitutions, R-groups and preferred emb
  c-term may be amidated

SEQ ID NO: 566 - protein, 31 aa, Artificial Sequence; identical to SEQ ID NO: 241
  Description of Artificial Sequence: Synthetic peptide
  MOD_RES (8)..(9): Any L- or D-natural amino acid and any non-natural amino acid; see  specification as filed for detail ed description of substitutions, R-groups  and preferred embodiments
  MOD_RES (11)..(12): Any L- or D-natural amino acid and any non-natural amino acid; see  specification as filed for detail ed description of substitutions, R-groups  and preferred embodiments
  MOD_RES (15)..(18): Any L- or D-natural or non-natural amino acid, and this range may     encompass 1 or 4 residues; see specification as filed for detailed  description of substitutions, R-groups and preferred emb
  c-term may be amidated

SEQ ID NO: 567 - protein, 31 aa, Artificial Sequence; identical to SEQ ID NO: 242
  Description of Artificial Sequence: Synthetic peptide
  MOD_RES (13)..(13): Any L- or D-natural amino acid and any non-natural amino acid; see  specification as filed for detail ed description of substitutions, R-groups  and preferred embodiments
  MOD_RES (15)..(18): Any L- or D-natural or non-natural amino acid, and this range may     encompass 1 or 4 residues; see specification as filed for detailed  description of substitutions, R-groups and preferred emb
  c-term may be amidated

SEQ ID NO: 568 - protein, 31 aa, Artificial Sequence; identical to SEQ ID NO: 243
  Description of Artificial Sequence: Synthetic peptide
  MOD_RES (1)..(1): Any L- or D-natural amino acid and any non-natural amino acid; see  specification as filed for detail ed description of substitutions, R-groups  and preferred embodiments
  MOD_RES (9)..(9): Any L- or D-natural amino acid and any non-natural amino acid; see  specification as filed for detail ed description of substitutions, R-groups  and preferred embodiments
  MOD_RES (11)..(11): Any L- or D-natural amino acid and any non-natural amino acid; see  specification as filed for detail ed description of substitutions, R-groups  and preferred embodiments
  MOD_RES (13)..(13): Any L- or D-natural amino acid and any non-natural amino acid; see  specification as filed for detail ed description of substitutions, R-groups  and preferred embodiments
  MOD_RES (15)..(18): Any L- or D-natural or non-natural amino acid, and this range may     encompass 1 or 4 residues; see specification as filed for detailed  description of substitutions, R-groups and preferred emb
  c-term may be amidated

SEQ ID NO: 569 - protein, 31 aa, Artificial Sequence; identical to SEQ ID NO: 244
  Description of Artificial Sequence: Synthetic peptide
  MOD_RES (2)..(2): Any L- or D-natural amino acid and any non-natural amino acid; see  specification as filed for detail ed description of substitutions, R-groups  and preferred embodiments
  MOD_RES (9)..(9): Any L- or D-natural amino acid and any non-natural amino acid; see  specification as filed for detail ed description of substitutions, R-groups  and preferred embodiments
  MOD_RES (11)..(11): Any L- or D-natural amino acid and any non-natural amino acid; see  specification as filed for detail ed description of substitutions, R-groups  and preferred embodiments
  MOD_RES (13)..(13): Any L- or D-natural amino acid and any non-natural amino acid; see  specification as filed for detail ed description of substitutions, R-groups  and preferred embodiments
  MOD_RES (15)..(18): Any L- or D-natural or non-natural amino acid, and this range may     encompass 1 or 4 residues; see specification as filed for detailed  description of substitutions, R-groups and preferred emb
  c-term may be amidated

SEQ ID NO: 570 - protein, 31 aa, Artificial Sequence; identical to SEQ ID NO: 245
  Description of Artificial Sequence: Synthetic peptide
  MOD_RES (3)..(3): Any L- or D-natural amino acid and any non-natural amino acid; see  specification as filed for detail ed description of substitutions, R-groups  and preferred embodiments
  MOD_RES (9)..(9): Any L- or D-natural amino acid and any non-natural amino acid; see  specification as filed for detail ed description of substitutions, R-groups  and preferred embodiments
  MOD_RES (11)..(11): Any L- or D-natural amino acid and any non-natural amino acid; see  specification as filed for detail ed description of substitutions, R-groups  and preferred embodiments
  MOD_RES (13)..(13): Any L- or D-natural amino acid and any non-natural amino acid; see  specification as filed for detail ed description of substitutions, R-groups  and preferred embodiments
  MOD_RES (15)..(18): Any L- or D-natural or non-natural amino acid, and this range may     encompass 1 or 4 residues; see specification as filed for detailed  description of substitutions, R-groups and preferred emb
  c-term may be amidated

SEQ ID NO: 571 - protein, 31 aa, Artificial Sequence; identical to SEQ ID NO: 246
  Description of Artificial Sequence: Synthetic peptide
  MOD_RES (4)..(4): Any L- or D-natural amino acid and any non-natural amino acid; see  specification as filed for detail ed description of substitutions, R-groups  and preferred embodiments
  MOD_RES (9)..(9): Any L- or D-natural amino acid and any non-natural amino acid; see  specification as filed for detail ed description of substitutions, R-groups  and preferred embodiments
  MOD_RES (11)..(11): Any L- or D-natural amino acid and any non-natural amino acid; see  specification as filed for detail ed description of substitutions, R-groups  and preferred embodiments
  MOD_RES (13)..(13): Any L- or D-natural amino acid and any non-natural amino acid; see  specification as filed for detail ed description of substitutions, R-groups  and preferred embodiments
  MOD_RES (15)..(18): Any L- or D-natural or non-natural amino acid, and this range may     encompass 1 or 4 residues; see specification as filed for detailed  description of substitutions, R-groups and preferred emb
  c-term may be amidated

SEQ ID NO: 572 - protein, 31 aa, Artificial Sequence; identical to SEQ ID NO: 247
  Description of Artificial Sequence: Synthetic peptide
  MOD_RES (5)..(5): Any L- or D-natural amino acid and any non-natural amino acid; see  specification as filed for detail ed description of substitutions, R-groups  and preferred embodiments
  MOD_RES (9)..(9): Any L- or D-natural amino acid and any non-natural amino acid; see  specification as filed for detail ed description of substitutions, R-groups  and preferred embodiments
  MOD_RES (11)..(11): Any L- or D-natural amino acid and any non-natural amino acid; see  specification as filed for detail ed description of substitutions, R-groups  and preferred embodiments
  MOD_RES (13)..(13): Any L- or D-natural amino acid and any non-natural amino acid; see  specification as filed for detail ed description of substitutions, R-groups  and preferred embodiments
  MOD_RES (15)..(18): Any L- or D-natural or non-natural amino acid, and this range may     encompass 1 or 4 residues; see specification as filed for detailed  description of substitutions, R-groups and preferred emb
  c-term may be amidated

SEQ ID NO: 573 - protein, 31 aa, Artificial Sequence; identical to SEQ ID NO: 248
  Description of Artificial Sequence: Synthetic peptide
  MOD_RES (6)..(6): Any L- or D-natural amino acid and any non-natural amino acid; see  specification as filed for detail ed description of substitutions, R-groups  and preferred embodiments
  MOD_RES (9)..(9): Any L- or D-natural amino acid and any non-natural amino acid; see  specification as filed for detail ed description of substitutions, R-groups  and preferred embodiments
  MOD_RES (11)..(11): Any L- or D-natural amino acid and any non-natural amino acid; see  specification as filed for detail ed description of substitutions, R-groups  and preferred embodiments
  MOD_RES (13)..(13): Any L- or D-natural amino acid and any non-natural amino acid; see  specification as filed for detail ed description of substitutions, R-groups  and preferred embodiments
  MOD_RES (15)..(18): Any L- or D-natural or non-natural amino acid, and this range may     encompass 1 or 4 residues; see specification as filed for detailed  description of substitutions, R-groups and preferred emb
  c-term may be amidated

SEQ ID NO: 574 - protein, 31 aa, Artificial Sequence; identical to SEQ ID NO: 249
  Description of Artificial Sequence: Synthetic peptide
  MOD_RES (7)..(7): Any L- or D-natural amino acid and any non-natural amino acid; see  specification as filed for detail ed description of substitutions, R-groups  and preferred embodiments
  MOD_RES (9)..(9): Any L- or D-natural amino acid and any non-natural amino acid; see  specification as filed for detail ed description of substitutions, R-groups  and preferred embodiments
  MOD_RES (11)..(11): Any L- or D-natural amino acid and any non-natural amino acid; see  specification as filed for detail ed description of substitutions, R-groups  and preferred embodiments
  MOD_RES (13)..(13): Any L- or D-natural amino acid and any non-natural amino acid; see  specification as filed for detail ed description of substitutions, R-groups  and preferred embodiments
  MOD_RES (15)..(18): Any L- or D-natural or non-natural amino acid, and this range may     encompass 1 or 4 residues; see specification as filed for detailed  description of substitutions, R-groups and preferred emb
  c-term may be amidated

SEQ ID NO: 575 - protein, 31 aa, Artificial Sequence; identical to SEQ ID NO: 250
  Description of Artificial Sequence: Synthetic peptide
  MOD_RES (8)..(9): Any L- or D-natural amino acid and any non-natural amino acid; see  specification as filed for detail ed description of substitutions, R-groups  and preferred embodiments
  MOD_RES (11)..(11): Any L- or D-natural amino acid and any non-natural amino acid; see  specification as filed for detail ed description of substitutions, R-groups  and preferred embodiments
  MOD_RES (13)..(13): Any L- or D-natural amino acid and any non-natural amino acid; see  specification as filed for detail ed description of substitutions, R-groups  and preferred embodiments
  MOD_RES (15)..(18): Any L- or D-natural or non-natural amino acid, and this range may     encompass 1 or 4 residues; see specification as filed for detailed  description of substitutions, R-groups and preferred emb
  c-term may be amidated

SEQ ID NO: 576 - protein, 31 aa, Artificial Sequence; identical to SEQ ID NO: 251
  Description of Artificial Sequence: Synthetic peptide
  MOD_RES (14)..(14): Any L- or D-natural amino acid and any non-natural amino acid; see  specification as filed for detail ed description of substitutions, R-groups  and preferred embodiments
  MOD_RES (15)..(18): Any L- or D-natural or non-natural amino acid, and this range may     encompass 1 or 4 residues; see specification as filed for detailed  description of substitutions, R-groups and preferred emb
  c-term may be amidated

SEQ ID NO: 577 - protein, 31 aa, Artificial Sequence; identical to SEQ ID NO: 252
  Description of Artificial Sequence: Synthetic peptide
  MOD_RES (1)..(1): Any L- or D-natural amino acid and any non-natural amino acid; see  specification as filed for detail ed description of substitutions, R-groups  and preferred embodiments
  MOD_RES (9)..(9): Any L- or D-natural amino acid and any non-natural amino acid; see  specification as filed for detail ed description of substitutions, R-groups  and preferred embodiments
  MOD_RES (11)..(11): Any L- or D-natural amino acid and any non-natural amino acid; see  specification as filed for detail ed description of substitutions, R-groups  and preferred embodiments
  MOD_RES (14)..(14): Any L- or D-natural amino acid and any non-natural amino acid; see  specification as filed for detail ed description of substitutions, R-groups  and preferred embodiments
  MOD_RES (15)..(18): Any L- or D-natural or non-natural amino acid, and this range may     encompass 1 or 4 residues; see specification as filed for detailed  description of substitutions, R-groups and preferred emb
  c-term may be amidated

SEQ ID NO: 578 - protein, 31 aa, Artificial Sequence; identical to SEQ ID NO: 253
  Description of Artificial Sequence: Synthetic peptide
  MOD_RES (2)..(2): Any L- or D-natural amino acid and any non-natural amino acid; see  specification as filed for detail ed description of substitutions, R-groups  and preferred embodiments
  MOD_RES (9)..(9): Any L- or D-natural amino acid and any non-natural amino acid; see  specification as filed for detail ed description of substitutions, R-groups  and preferred embodiments
  MOD_RES (11)..(11): Any L- or D-natural amino acid and any non-natural amino acid; see  specification as filed for detail ed description of substitutions, R-groups  and preferred embodiments
  MOD_RES (14)..(14): Any L- or D-natural amino acid and any non-natural amino acid; see  specification as filed for detail ed description of substitutions, R-groups  and preferred embodiments
  MOD_RES (15)..(18): Any L- or D-natural or non-natural amino acid, and this range may     encompass 1 or 4 residues; see specification as filed for detailed  description of substitutions, R-groups and preferred emb
  c-term may be amidated

SEQ ID NO: 579 - protein, 31 aa, Artificial Sequence; identical to SEQ ID NO: 254
  Description of Artificial Sequence: Synthetic peptide
  MOD_RES (3)..(3): Any L- or D-natural amino acid and any non-natural amino acid; see  specification as filed for detail ed description of substitutions, R-groups  and preferred embodiments
  MOD_RES (9)..(9): Any L- or D-natural amino acid and any non-natural amino acid; see  specification as filed for detail ed description of substitutions, R-groups  and preferred embodiments
  MOD_RES (11)..(11): Any L- or D-natural amino acid and any non-natural amino acid; see  specification as filed for detail ed description of substitutions, R-groups  and preferred embodiments
  MOD_RES (14)..(14): Any L- or D-natural amino acid and any non-natural amino acid; see  specification as filed for detail ed description of substitutions, R-groups  and preferred embodiments
  MOD_RES (15)..(18): Any L- or D-natural or non-natural amino acid, and this range may     encompass 1 or 4 residues; see specification as filed for detailed  description of substitutions, R-groups and preferred emb
  c-term may be amidated

SEQ ID NO: 580 - protein, 31 aa, Artificial Sequence; identical to SEQ ID NO: 255
  Description of Artificial Sequence: Synthetic peptide
  MOD_RES (4)..(4): Any L- or D-natural amino acid and any non-natural amino acid; see  specification as filed for detail ed description of substitutions, R-groups  and preferred embodiments
  MOD_RES (9)..(9): Any L- or D-natural amino acid and any non-natural amino acid; see  specification as filed for detail ed description of substitutions, R-groups  and preferred embodiments
  MOD_RES (11)..(11): Any L- or D-natural amino acid and any non-natural amino acid; see  specification as filed for detail ed description of substitutions, R-groups  and preferred embodiments
  MOD_RES (14)..(14): Any L- or D-natural amino acid and any non-natural amino acid; see  specification as filed for detail ed description of substitutions, R-groups  and preferred embodiments
  MOD_RES (15)..(18): Any L- or D-natural or non-natural amino acid, and this range may     encompass 1 or 4 residues; see specification as filed for detailed  description of substitutions, R-groups and preferred emb
  c-term may be amidated

SEQ ID NO: 581 - protein, 31 aa, Artificial Sequence; identical to SEQ ID NO: 256
  Description of Artificial Sequence: Synthetic peptide
  MOD_RES (5)..(5): Any L- or D-natural amino acid and any non-natural amino acid; see  specification as filed for detail ed description of substitutions, R-groups  and preferred embodiments
  MOD_RES (9)..(9): Any L- or D-natural amino acid and any non-natural amino acid; see  specification as filed for detail ed description of substitutions, R-groups  and preferred embodiments
  MOD_RES (11)..(11): Any L- or D-natural amino acid and any non-natural amino acid; see  specification as filed for detail ed description of substitutions, R-groups  and preferred embodiments
  MOD_RES (14)..(14): Any L- or D-natural amino acid and any non-natural amino acid; see  specification as filed for detail ed description of substitutions, R-groups  and preferred embodiments
  MOD_RES (15)..(18): Any L- or D-natural or non-natural amino acid, and this range may     encompass 1 or 4 residues; see specification as filed for detailed  description of substitutions, R-groups and preferred emb
  c-term may be amidated

SEQ ID NO: 582 - protein, 31 aa, Artificial Sequence; identical to SEQ ID NO: 257
  Description of Artificial Sequence: Synthetic peptide
  MOD_RES (6)..(6): Any L- or D-natural amino acid and any non-natural amino acid; see  specification as filed for detail ed description of substitutions, R-groups  and preferred embodiments
  MOD_RES (9)..(9): Any L- or D-natural amino acid and any non-natural amino acid; see  specification as filed for detail ed description of substitutions, R-groups  and preferred embodiments
  MOD_RES (11)..(11): Any L- or D-natural amino acid and any non-natural amino acid; see  specification as filed for detail ed description of substitutions, R-groups  and preferred embodiments
  MOD_RES (14)..(14): Any L- or D-natural amino acid and any non-natural amino acid; see  specification as filed for detail ed description of substitutions, R-groups  and preferred embodiments
  MOD_RES (15)..(18): Any L- or D-natural or non-natural amino acid, and this range may     encompass 1 or 4 residues; see specification as filed for detailed  description of substitutions, R-groups and preferred emb
  c-term may be amidated

SEQ ID NO: 583 - protein, 31 aa, Artificial Sequence; identical to SEQ ID NO: 258
  Description of Artificial Sequence: Synthetic peptide
  MOD_RES (7)..(7): Any L- or D-natural amino acid and any non-natural amino acid; see  specification as filed for detail ed description of substitutions, R-groups  and preferred embodiments
  MOD_RES (9)..(9): Any L- or D-natural amino acid and any non-natural amino acid; see  specification as filed for detail ed description of substitutions, R-groups  and preferred embodiments
  MOD_RES (11)..(11): Any L- or D-natural amino acid and any non-natural amino acid; see  specification as filed for detail ed description of substitutions, R-groups  and preferred embodiments
  MOD_RES (14)..(14): Any L- or D-natural amino acid and any non-natural amino acid; see  specification as filed for detail ed description of substitutions, R-groups  and preferred embodiments
  MOD_RES (15)..(18): Any L- or D-natural or non-natural amino acid, and this range may     encompass 1 or 4 residues; see specification as filed for detailed  description of substitutions, R-groups and preferred emb
  c-term may be amidated

SEQ ID NO: 584 - protein, 31 aa, Artificial Sequence; identical to SEQ ID NO: 259
  Description of Artificial Sequence: Synthetic peptide
  MOD_RES (8)..(9): Any L- or D-natural amino acid and any non-natural amino acid; see  specification as filed for detail ed description of substitutions, R-groups  and preferred embodiments
  MOD_RES (11)..(11): Any L- or D-natural amino acid and any non-natural amino acid; see  specification as filed for detail ed description of substitutions, R-groups  and preferred embodiments
  MOD_RES (14)..(14): Any L- or D-natural amino acid and any non-natural amino acid; see  specification as filed for detail ed description of substitutions, R-groups  and preferred embodiments
  MOD_RES (15)..(18): Any L- or D-natural or non-natural amino acid, and this range may     encompass 1 or 4 residues; see specification as filed for detailed  description of substitutions, R-groups and preferred emb
  c-term may be amidated

SEQ ID NO: 585 - protein, 34 aa, Artificial Sequence; identical to SEQ ID NO: 350
  Description of Artificial Sequence: Synthetic peptide
  MOD_RES (18)..(21): Any L- or D-natural or non-natural amino acid, and this range may     encompass 1 or 4 residues; see specification as filed for detailed  description of substitutions, R-groups and preferred emb
  c-term may be amidated

SEQ ID NO: 586 - protein, 34 aa, Artificial Sequence; identical to SEQ ID NO: 351
  Description of Artificial Sequence: Synthetic peptide
  MOD_RES (1)..(1): Any L- or D-natural amino acid and any non-natural amino acid; see  specification as filed for detail ed description of substitutions, R-groups  and preferred embodiments
  MOD_RES (9)..(9): Any L- or D-natural amino acid and any non-natural amino acid; see  specification as filed for detail ed description of substitutions, R-groups  and preferred embodiments
  MOD_RES (11)..(11): Any L- or D-natural amino acid and any non-natural amino acid; see  specification as filed for detail ed description of substitutions, R-groups  and preferred embodiments
  MOD_RES (18)..(21): Any L- or D-natural or non-natural amino acid, and this range may     encompass 1 or 4 residues; see specification as filed for detailed  description of substitutions, R-groups and preferred emb
  c-term may be amidated

SEQ ID NO: 587 - protein, 34 aa, Artificial Sequence; identical to SEQ ID NO: 352
  Description of Artificial Sequence: Synthetic peptide
  MOD_RES (2)..(2): Any L- or D-natural amino acid and any non-natural amino acid; see  specification as filed for detail ed description of substitutions, R-groups  and preferred embodiments
  MOD_RES (9)..(9): Any L- or D-natural amino acid and any non-natural amino acid; see  specification as filed for detail ed description of substitutions, R-groups  and preferred embodiments
  MOD_RES (11)..(11): Any L- or D-natural amino acid and any non-natural amino acid; see  specification as filed for detail ed description of substitutions, R-groups  and preferred embodiments
  MOD_RES (18)..(21): Any L- or D-natural or non-natural amino acid, and this range may     encompass 1 or 4 residues; see specification as filed for detailed  description of substitutions, R-groups and preferred emb
  c-term may be amidated

SEQ ID NO: 588 - protein, 34 aa, Artificial Sequence; identical to SEQ ID NO: 353
  Description of Artificial Sequence: Synthetic peptide
  MOD_RES (3)..(3): Any L- or D-natural amino acid and any non-natural amino acid; see  specification as filed for detail ed description of substitutions, R-groups  and preferred embodiments
  MOD_RES (9)..(9): Any L- or D-natural amino acid and any non-natural amino acid; see  specification as filed for detail ed description of substitutions, R-groups  and preferred embodiments
  MOD_RES (11)..(11): Any L- or D-natural amino acid and any non-natural amino acid; see  specification as filed for detail ed description of substitutions, R-groups  and preferred embodiments
  MOD_RES (18)..(21): Any L- or D-natural or non-natural amino acid, and this range may     encompass 1 or 4 residues; see specification as filed for detailed  description of substitutions, R-groups and preferred emb
  c-term may be amidated

SEQ ID NO: 589 - protein, 34 aa, Artificial Sequence; identical to SEQ ID NO: 354
  Description of Artificial Sequence: Synthetic peptide
  MOD_RES (4)..(4): Any L- or D-natural amino acid and any non-natural amino acid; see  specification as filed for detail ed description of substitutions, R-groups  and preferred embodiments
  MOD_RES (9)..(9): Any L- or D-natural amino acid and any non-natural amino acid; see  specification as filed for detail ed description of substitutions, R-groups  and preferred embodiments
  MOD_RES (11)..(11): Any L- or D-natural amino acid and any non-natural amino acid; see  specification as filed for detail ed description of substitutions, R-groups  and preferred embodiments
  MOD_RES (18)..(21): Any L- or D-natural or non-natural amino acid, and this range may     encompass 1 or 4 residues; see specification as filed for detailed  description of substitutions, R-groups and preferred emb
  c-term may be amidated

SEQ ID NO: 590 - protein, 34 aa, Artificial Sequence; identical to SEQ ID NO: 355
  Description of Artificial Sequence: Synthetic peptide
  MOD_RES (5)..(5): Any L- or D-natural amino acid and any non-natural amino acid; see  specification as filed for detail ed description of substitutions, R-groups  and preferred embodiments
  MOD_RES (9)..(9): Any L- or D-natural amino acid and any non-natural amino acid; see  specification as filed for detail ed description of substitutions, R-groups  and preferred embodiments
  MOD_RES (11)..(11): Any L- or D-natural amino acid and any non-natural amino acid; see  specification as filed for detail ed description of substitutions, R-groups  and preferred embodiments
  MOD_RES (18)..(21): Any L- or D-natural or non-natural amino acid, and this range may     encompass 1 or 4 residues; see specification as filed for detailed  description of substitutions, R-groups and preferred emb
  c-term may be amidated

SEQ ID NO: 591 - protein, 34 aa, Artificial Sequence; identical to SEQ ID NO: 356
  Description of Artificial Sequence: Synthetic peptide
  MOD_RES (6)..(6): Any L- or D-natural amino acid and any non-natural amino acid; see  specification as filed for detail ed description of substitutions, R-groups  and preferred embodiments
  MOD_RES (9)..(9): Any L- or D-natural amino acid and any non-natural amino acid; see  specification as filed for detail ed description of substitutions, R-groups  and preferred embodiments
  MOD_RES (11)..(11): Any L- or D-natural amino acid and any non-natural amino acid; see  specification as filed for detail ed description of substitutions, R-groups  and preferred embodiments
  MOD_RES (18)..(21): Any L- or D-natural or non-natural amino acid, and this range may     encompass 1 or 4 residues; see specification as filed for detailed  description of substitutions, R-groups and preferred emb
  c-term may be amidated

SEQ ID NO: 592 - protein, 34 aa, Artificial Sequence; identical to SEQ ID NO: 357
  Description of Artificial Sequence: Synthetic peptide
  MOD_RES (7)..(7): Any L- or D-natural amino acid and any non-natural amino acid; see  specification as filed for detail ed description of substitutions, R-groups  and preferred embodiments
  MOD_RES (9)..(9): Any L- or D-natural amino acid and any non-natural amino acid; see  specification as filed for detail ed description of substitutions, R-groups  and preferred embodiments
  MOD_RES (11)..(11): Any L- or D-natural amino acid and any non-natural amino acid; see  specification as filed for detail ed description of substitutions, R-groups  and preferred embodiments
  MOD_RES (18)..(21): Any L- or D-natural or non-natural amino acid, and this range may     encompass 1 or 4 residues; see specification as filed for detailed  description of substitutions, R-groups and preferred emb
  c-term may be amidated

SEQ ID NO: 593 - protein, 34 aa, Artificial Sequence; identical to SEQ ID NO: 358
  Description of Artificial Sequence: Synthetic peptide
  MOD_RES (8)..(9): Any L- or D-natural amino acid and any non-natural amino acid; see  specification as filed for detail ed description of substitutions, R-groups  and preferred embodiments
  MOD_RES (11)..(11): Any L- or D-natural amino acid and any non-natural amino acid; see  specification as filed for detail ed description of substitutions, R-groups  and preferred embodiments
  MOD_RES (18)..(21): Any L- or D-natural or non-natural amino acid, and this range may     encompass 1 or 4 residues; see specification as filed for detailed  description of substitutions, R-groups and preferred emb
  c-term may be amidated

SEQ ID NO: 594 - protein, 34 aa, Artificial Sequence; identical to SEQ ID NO: 359
  Description of Artificial Sequence: Synthetic peptide
  MOD_RES (12)..(12): Any L- or D-natural amino acid and any non-natural amino acid; see  specification as filed for detail ed description of substitutions, R-groups  and preferred embodiments
  MOD_RES (18)..(21): Any L- or D-natural or non-natural amino acid, and this range may     encompass 1 or 4 residues; see specification as filed for detailed  description of substitutions, R-groups and preferred emb
  c-term may be amidated

SEQ ID NO: 595 - protein, 34 aa, Artificial Sequence; identical to SEQ ID NO: 360
  Description of Artificial Sequence: Synthetic peptide
  MOD_RES (1)..(1): Any L- or D-natural amino acid and any non-natural amino acid; see  specification as filed for detail ed description of substitutions, R-groups  and preferred embodiments
  MOD_RES (9)..(9): Any L- or D-natural amino acid and any non-natural amino acid; see  specification as filed for detail ed description of substitutions, R-groups  and preferred embodiments
  MOD_RES (11)..(12): Any L- or D-natural amino acid and any non-natural amino acid; see  specification as filed for detail ed description of substitutions, R-groups  and preferred embodiments
  MOD_RES (18)..(21): Any L- or D-natural or non-natural amino acid, and this range may     encompass 1 or 4 residues; see specification as filed for detailed  description of substitutions, R-groups and preferred emb
  c-term may be amidated

SEQ ID NO: 596 - protein, 34 aa, Artificial Sequence; identical to SEQ ID NO: 361
  Description of Artificial Sequence: Synthetic peptide
  MOD_RES (2)..(2): Any L- or D-natural amino acid and any non-natural amino acid; see  specification as filed for detail ed description of substitutions, R-groups  and preferred embodiments
  MOD_RES (9)..(9): Any L- or D-natural amino acid and any non-natural amino acid; see  specification as filed for detail ed description of substitutions, R-groups  and preferred embodiments
  MOD_RES (11)..(12): Any L- or D-natural amino acid and any non-natural amino acid; see  specification as filed for detail ed description of substitutions, R-groups  and preferred embodiments
  MOD_RES (18)..(21): Any L- or D-natural or non-natural amino acid, and this range may     encompass 1 or 4 residues; see specification as filed for detailed  description of substitutions, R-groups and preferred emb
  c-term may be amidated

SEQ ID NO: 597 - protein, 34 aa, Artificial Sequence; identical to SEQ ID NO: 362
  Description of Artificial Sequence: Synthetic peptide
  MOD_RES (3)..(3): Any L- or D-natural amino acid and any non-natural amino acid; see  specification as filed for detail ed description of substitutions, R-groups  and preferred embodiments
  MOD_RES (9)..(9): Any L- or D-natural amino acid and any non-natural amino acid; see  specification as filed for detail ed description of substitutions, R-groups  and preferred embodiments
  MOD_RES (11)..(12): Any L- or D-natural amino acid and any non-natural amino acid; see  specification as filed for detail ed description of substitutions, R-groups  and preferred embodiments
  MOD_RES (18)..(21): Any L- or D-natural or non-natural amino acid, and this range may     encompass 1 or 4 residues; see specification as filed for detailed  description of substitutions, R-groups and preferred emb
  c-term may be amidated

SEQ ID NO: 598 - protein, 34 aa, Artificial Sequence; identical to SEQ ID NO: 363
  Description of Artificial Sequence: Synthetic peptide
  MOD_RES (4)..(4): Any L- or D-natural amino acid and any non-natural amino acid; see  specification as filed for detail ed description of substitutions, R-groups  and preferred embodiments
  MOD_RES (9)..(9): Any L- or D-natural amino acid and any non-natural amino acid; see  specification as filed for detail ed description of substitutions, R-groups  and preferred embodiments
  MOD_RES (11)..(12): Any L- or D-natural amino acid and any non-natural amino acid; see  specification as filed for detail ed description of substitutions, R-groups  and preferred embodiments
  MOD_RES (18)..(21): Any L- or D-natural or non-natural amino acid, and this range may     encompass 1 or 4 residues; see specification as filed for detailed  description of substitutions, R-groups and preferred emb
  c-term may be amidated

SEQ ID NO: 599 - protein, 34 aa, Artificial Sequence; identical to SEQ ID NO: 364
  Description of Artificial Sequence: Synthetic peptide
  MOD_RES (5)..(5): Any L- or D-natural amino acid and any non-natural amino acid; see  specification as filed for detail ed description of substitutions, R-groups  and preferred embodiments
  MOD_RES (9)..(9): Any L- or D-natural amino acid and any non-natural amino acid; see  specification as filed for detail ed description of substitutions, R-groups  and preferred embodiments
  MOD_RES (11)..(12): Any L- or D-natural amino acid and any non-natural amino acid; see  specification as filed for detail ed description of substitutions, R-groups  and preferred embodiments
  MOD_RES (18)..(21): Any L- or D-natural or non-natural amino acid, and this range may     encompass 1 or 4 residues; see specification as filed for detailed  description of substitutions, R-groups and preferred emb
  c-term may be amidated

SEQ ID NO: 600 - protein, 34 aa, Artificial Sequence; identical to SEQ ID NO: 365
  Description of Artificial Sequence: Synthetic peptide
  MOD_RES (6)..(6): Any L- or D-natural amino acid and any non-natural amino acid; see  specification as filed for detail ed description of substitutions, R-groups  and preferred embodiments
  MOD_RES (9)..(9): Any L- or D-natural amino acid and any non-natural amino acid; see  specification as filed for detail ed description of substitutions, R-groups  and preferred embodiments
  MOD_RES (11)..(12): Any L- or D-natural amino acid and any non-natural amino acid; see  specification as filed for detail ed description of substitutions, R-groups  and preferred embodiments
  MOD_RES (18)..(21): Any L- or D-natural or non-natural amino acid, and this range may     encompass 1 or 4 residues; see specification as filed for detailed  description of substitutions, R-groups and preferred emb
  c-term may be amidated

SEQ ID NO: 601 - protein, 34 aa, Artificial Sequence; identical to SEQ ID NO: 366
  Description of Artificial Sequence: Synthetic peptide
  MOD_RES (7)..(7): Any L- or D-natural amino acid and any non-natural amino acid; see  specification as filed for detail ed description of substitutions, R-groups  and preferred embodiments
  MOD_RES (9)..(9): Any L- or D-natural amino acid and any non-natural amino acid; see  specification as filed for detail ed description of substitutions, R-groups  and preferred embodiments
  MOD_RES (11)..(12): Any L- or D-natural amino acid and any non-natural amino acid; see  specification as filed for detail ed description of substitutions, R-groups  and preferred embodiments
  MOD_RES (18)..(21): Any L- or D-natural or non-natural amino acid, and this range may     encompass 1 or 4 residues; see specification as filed for detailed  description of substitutions, R-groups and preferred emb
  c-term may be amidated

SEQ ID NO: 602 - protein, 34 aa, Artificial Sequence; identical to SEQ ID NO: 367
  Description of Artificial Sequence: Synthetic peptide
  MOD_RES (8)..(9): Any L- or D-natural amino acid and any non-natural amino acid; see  specification as filed for detail ed description of substitutions, R-groups  and preferred embodiments
  MOD_RES (11)..(12): Any L- or D-natural amino acid and any non-natural amino acid; see  specification as filed for detail ed description of substitutions, R-groups  and preferred embodiments
  MOD_RES (18)..(21): Any L- or D-natural or non-natural amino acid, and this range may     encompass 1 or 4 residues; see specification as filed for detailed  description of substitutions, R-groups and preferred emb
  c-term may be amidated

SEQ ID NO: 603 - protein, 34 aa, Artificial Sequence; identical to SEQ ID NO: 368
  Description of Artificial Sequence: Synthetic peptide
  MOD_RES (13)..(13): Any L- or D-natural amino acid and any non-natural amino acid; see  specification as filed for detail ed description of substitutions, R-groups  and preferred embodiments
  MOD_RES (18)..(21): Any L- or D-natural or non-natural amino acid, and this range may     encompass 1 or 4 residues; see specification as filed for detailed  description of substitutions, R-groups and preferred emb
  c-term may be amidated

SEQ ID NO: 604 - protein, 34 aa, Artificial Sequence; identical to SEQ ID NO: 369
  Description of Artificial Sequence: Synthetic peptide
  MOD_RES (1)..(1): Any L- or D-natural amino acid and any non-natural amino acid; see  specification as filed for detail ed description of substitutions, R-groups  and preferred embodiments
  MOD_RES (9)..(9): Any L- or D-natural amino acid and any non-natural amino acid; see  specification as filed for detail ed description of substitutions, R-groups  and preferred embodiments
  MOD_RES (11)..(11): Any L- or D-natural amino acid and any non-natural amino acid; see  specification as filed for detail ed description of substitutions, R-groups  and preferred embodiments
  MOD_RES (13)..(13): Any L- or D-natural amino acid and any non-natural amino acid; see  specification as filed for detail ed description of substitutions, R-groups  and preferred embodiments
  MOD_RES (18)..(21): Any L- or D-natural or non-natural amino acid, and this range may     encompass 1 or 4 residues; see specification as filed for detailed  description of substitutions, R-groups and preferred emb
  c-term may be amidated

SEQ ID NO: 605 - protein, 34 aa, Artificial Sequence; identical to SEQ ID NO: 370
  Description of Artificial Sequence: Synthetic peptide
  MOD_RES (2)..(2): Any L- or D-natural amino acid and any non-natural amino acid; see  specification as filed for detail ed description of substitutions, R-groups  and preferred embodiments
  MOD_RES (9)..(9): Any L- or D-natural amino acid and any non-natural amino acid; see  specification as filed for detail ed description of substitutions, R-groups  and preferred embodiments
  MOD_RES (11)..(11): Any L- or D-natural amino acid and any non-natural amino acid; see  specification as filed for detail ed description of substitutions, R-groups  and preferred embodiments
  MOD_RES (13)..(13): Any L- or D-natural amino acid and any non-natural amino acid; see  specification as filed for detail ed description of substitutions, R-groups  and preferred embodiments
  MOD_RES (18)..(21): Any L- or D-natural or non-natural amino acid, and this range may     encompass 1 or 4 residues; see specification as filed for detailed  description of substitutions, R-groups and preferred emb
  c-term may be amidated

SEQ ID NO: 606 - protein, 34 aa, Artificial Sequence; identical to SEQ ID NO: 371
  Description of Artificial Sequence: Synthetic peptide
  MOD_RES (3)..(3): Any L- or D-natural amino acid and any non-natural amino acid; see  specification as filed for detail ed description of substitutions, R-groups  and preferred embodiments
  MOD_RES (9)..(9): Any L- or D-natural amino acid and any non-natural amino acid; see  specification as filed for detail ed description of substitutions, R-groups  and preferred embodiments
  MOD_RES (11)..(11): Any L- or D-natural amino acid and any non-natural amino acid; see  specification as filed for detail ed description of substitutions, R-groups  and preferred embodiments
  MOD_RES (13)..(13): Any L- or D-natural amino acid and any non-natural amino acid; see  specification as filed for detail ed description of substitutions, R-groups  and preferred embodiments
  MOD_RES (18)..(21): Any L- or D-natural or non-natural amino acid, and this range may     encompass 1 or 4 residues; see specification as filed for detailed  description of substitutions, R-groups and preferred emb
  c-term may be amidated

SEQ ID NO: 607 - protein, 34 aa, Artificial Sequence; identical to SEQ ID NO: 372
  Description of Artificial Sequence: Synthetic peptide
  MOD_RES (4)..(4): Any L- or D-natural amino acid and any non-natural amino acid; see  specification as filed for detail ed description of substitutions, R-groups  and preferred embodiments
  MOD_RES (9)..(9): Any L- or D-natural amino acid and any non-natural amino acid; see  specification as filed for detail ed description of substitutions, R-groups  and preferred embodiments
  MOD_RES (11)..(11): Any L- or D-natural amino acid and any non-natural amino acid; see  specification as filed for detail ed description of substitutions, R-groups  and preferred embodiments
  MOD_RES (13)..(13): Any L- or D-natural amino acid and any non-natural amino acid; see  specification as filed for detail ed description of substitutions, R-groups  and preferred embodiments
  MOD_RES (18)..(21): Any L- or D-natural or non-natural amino acid, and this range may     encompass 1 or 4 residues; see specification as filed for detailed  description of substitutions, R-groups and preferred emb
  c-term may be amidated

SEQ ID NO: 608 - protein, 34 aa, Artificial Sequence; identical to SEQ ID NO: 373
  Description of Artificial Sequence: Synthetic peptide
  MOD_RES (5)..(5): Any L- or D-natural amino acid and any non-natural amino acid; see  specification as filed for detail ed description of substitutions, R-groups  and preferred embodiments
  MOD_RES (9)..(9): Any L- or D-natural amino acid and any non-natural amino acid; see  specification as filed for detail ed description of substitutions, R-groups  and preferred embodiments
  MOD_RES (11)..(11): Any L- or D-natural amino acid and any non-natural amino acid; see  specification as filed for detail ed description of substitutions, R-groups  and preferred embodiments
  MOD_RES (13)..(13): Any L- or D-natural amino acid and any non-natural amino acid; see  specification as filed for detail ed description of substitutions, R-groups  and preferred embodiments
  MOD_RES (18)..(21): Any L- or D-natural or non-natural amino acid, and this range may     encompass 1 or 4 residues; see specification as filed for detailed  description of substitutions, R-groups and preferred emb
  c-term may be amidated

SEQ ID NO: 609 - protein, 34 aa, Artificial Sequence; identical to SEQ ID NO: 374
  Description of Artificial Sequence: Synthetic peptide
  MOD_RES (6)..(6): Any L- or D-natural amino acid and any non-natural amino acid; see  specification as filed for detail ed description of substitutions, R-groups  and preferred embodiments
  MOD_RES (9)..(9): Any L- or D-natural amino acid and any non-natural amino acid; see  specification as filed for detail ed description of substitutions, R-groups  and preferred embodiments
  MOD_RES (11)..(11): Any L- or D-natural amino acid and any non-natural amino acid; see  specification as filed for detail ed description of substitutions, R-groups  and preferred embodiments
  MOD_RES (13)..(13): Any L- or D-natural amino acid and any non-natural amino acid; see  specification as filed for detail ed description of substitutions, R-groups  and preferred embodiments
  MOD_RES (18)..(21): Any L- or D-natural or non-natural amino acid, and this range may     encompass 1 or 4 residues; see specification as filed for detailed  description of substitutions, R-groups and preferred emb
  c-term may be amidated

SEQ ID NO: 610 - protein, 34 aa, Artificial Sequence; identical to SEQ ID NO: 375
  Description of Artificial Sequence: Synthetic peptide
  MOD_RES (7)..(7): Any L- or D-natural amino acid and any non-natural amino acid; see  specification as filed for detail ed description of substitutions, R-groups  and preferred embodiments
  MOD_RES (9)..(9): Any L- or D-natural amino acid and any non-natural amino acid; see  specification as filed for detail ed description of substitutions, R-groups  and preferred embodiments
  MOD_RES (11)..(11): Any L- or D-natural amino acid and any non-natural amino acid; see  specification as filed for detail ed description of substitutions, R-groups  and preferred embodiments
  MOD_RES (13)..(13): Any L- or D-natural amino acid and any non-natural amino acid; see  specification as filed for detail ed description of substitutions, R-groups  and preferred embodiments
  MOD_RES (18)..(21): Any L- or D-natural or non-natural amino acid, and this range may     encompass 1 or 4 residues; see specification as filed for detailed  description of substitutions, R-groups and preferred emb
  c-term may be amidated

SEQ ID NO: 611 - protein, 34 aa, Artificial Sequence; identical to SEQ ID NO: 376
  Description of Artificial Sequence: Synthetic peptide
  MOD_RES (8)..(9): Any L- or D-natural amino acid and any non-natural amino acid; see  specification as filed for detail ed description of substitutions, R-groups  and preferred embodiments
  MOD_RES (11)..(11): Any L- or D-natural amino acid and any non-natural amino acid; see  specification as filed for detail ed description of substitutions, R-groups  and preferred embodiments
  MOD_RES (13)..(13): Any L- or D-natural amino acid and any non-natural amino acid; see  specification as filed for detail ed description of substitutions, R-groups  and preferred embodiments
  MOD_RES (18)..(21): Any L- or D-natural or non-natural amino acid, and this range may     encompass 1 or 4 residues; see specification as filed for detailed  description of substitutions, R-groups and preferred emb
  c-term may be amidated

SEQ ID NO: 612 - protein, 34 aa, Artificial Sequence; identical to SEQ ID NO: 377
  Description of Artificial Sequence: Synthetic peptide
  MOD_RES (14)..(14): Any L- or D-natural amino acid and any non-natural amino acid; see  specification as filed for detail ed description of substitutions, R-groups  and preferred embodiments
  MOD_RES (18)..(21): Any L- or D-natural or non-natural amino acid, and this range may     encompass 1 or 4 residues; see specification as filed for detailed  description of substitutions, R-groups and preferred emb
  c-term may be amidated

SEQ ID NO: 613 - protein, 34 aa, Artificial Sequence; identical to SEQ ID NO: 378
  Description of Artificial Sequence: Synthetic peptide
  MOD_RES (1)..(1): Any L- or D-natural amino acid and any non-natural amino acid; see  specification as filed for detail ed description of substitutions, R-groups  and preferred embodiments
  MOD_RES (9)..(9): Any L- or D-natural amino acid and any non-natural amino acid; see  specification as filed for detail ed description of substitutions, R-groups  and preferred embodiments
  MOD_RES (11)..(11): Any L- or D-natural amino acid and any non-natural amino acid; see  specification as filed for detail ed description of substitutions, R-groups  and preferred embodiments
  MOD_RES (14)..(14): Any L- or D-natural amino acid and any non-natural amino acid; see  specification as filed for detail ed description of substitutions, R-groups  and preferred embodiments
  MOD_RES (18)..(21): Any L- or D-natural or non-natural amino acid, and this range may     encompass 1 or 4 residues; see specification as filed for detailed  description of substitutions, R-groups and preferred emb
  c-term may be amidated

SEQ ID NO: 614 - protein, 34 aa, Artificial Sequence; identical to SEQ ID NO: 379
  Description of Artificial Sequence: Synthetic peptide
  MOD_RES (2)..(2): Any L- or D-natural amino acid and any non-natural amino acid; see  specification as filed for detail ed description of substitutions, R-groups  and preferred embodiments
  MOD_RES (9)..(9): Any L- or D-natural amino acid and any non-natural amino acid; see  specification as filed for detail ed description of substitutions, R-groups  and preferred embodiments
  MOD_RES (11)..(11): Any L- or D-natural amino acid and any non-natural amino acid; see  specification as filed for detail ed description of substitutions, R-groups  and preferred embodiments
  MOD_RES (14)..(14): Any L- or D-natural amino acid and any non-natural amino acid; see  specification as filed for detail ed description of substitutions, R-groups  and preferred embodiments
  MOD_RES (18)..(21): Any L- or D-natural or non-natural amino acid, and this range may     encompass 1 or 4 residues; see specification as filed for detailed  description of substitutions, R-groups and preferred emb
  c-term may be amidated

SEQ ID NO: 615 - protein, 34 aa, Artificial Sequence; identical to SEQ ID NO: 380
  Description of Artificial Sequence: Synthetic peptide
  MOD_RES (3)..(3): Any L- or D-natural amino acid and any non-natural amino acid; see  specification as filed for detail ed description of substitutions, R-groups  and preferred embodiments
  MOD_RES (9)..(9): Any L- or D-natural amino acid and any non-natural amino acid; see  specification as filed for detail ed description of substitutions, R-groups  and preferred embodiments
  MOD_RES (11)..(11): Any L- or D-natural amino acid and any non-natural amino acid; see  specification as filed for detail ed description of substitutions, R-groups  and preferred embodiments
  MOD_RES (14)..(14): Any L- or D-natural amino acid and any non-natural amino acid; see  specification as filed for detail ed description of substitutions, R-groups  and preferred embodiments
  MOD_RES (18)..(21): Any L- or D-natural or non-natural amino acid, and this range may     encompass 1 or 4 residues; see specification as filed for detailed  description of substitutions, R-groups and preferred emb
  c-term may be amidated

SEQ ID NO: 616 - protein, 34 aa, Artificial Sequence; identical to SEQ ID NO: 381
  Description of Artificial Sequence: Synthetic peptide
  MOD_RES (4)..(4): Any L- or D-natural amino acid and any non-natural amino acid; see  specification as filed for detail ed description of substitutions, R-groups  and preferred embodiments
  MOD_RES (9)..(9): Any L- or D-natural amino acid and any non-natural amino acid; see  specification as filed for detail ed description of substitutions, R-groups  and preferred embodiments
  MOD_RES (11)..(11): Any L- or D-natural amino acid and any non-natural amino acid; see  specification as filed for detail ed description of substitutions, R-groups  and preferred embodiments
  MOD_RES (14)..(14): Any L- or D-natural amino acid and any non-natural amino acid; see  specification as filed for detail ed description of substitutions, R-groups  and preferred embodiments
  MOD_RES (18)..(21): Any L- or D-natural or non-natural amino acid, and this range may     encompass 1 or 4 residues; see specification as filed for detailed  description of substitutions, R-groups and preferred emb
  c-term may be amidated

SEQ ID NO: 617 - protein, 34 aa, Artificial Sequence; identical to SEQ ID NO: 382
  Description of Artificial Sequence: Synthetic peptide
  MOD_RES (5)..(5): Any L- or D-natural amino acid and any non-natural amino acid; see  specification as filed for detail ed description of substitutions, R-groups  and preferred embodiments
  MOD_RES (9)..(9): Any L- or D-natural amino acid and any non-natural amino acid; see  specification as filed for detail ed description of substitutions, R-groups  and preferred embodiments
  MOD_RES (11)..(11): Any L- or D-natural amino acid and any non-natural amino acid; see  specification as filed for detail ed description of substitutions, R-groups  and preferred embodiments
  MOD_RES (14)..(14): Any L- or D-natural amino acid and any non-natural amino acid; see  specification as filed for detail ed description of substitutions, R-groups  and preferred embodiments
  MOD_RES (18)..(21): Any L- or D-natural or non-natural amino acid, and this range may     encompass 1 or 4 residues; see specification as filed for detailed  description of substitutions, R-groups and preferred emb
  c-term may be amidated

SEQ ID NO: 618 - protein, 34 aa, Artificial Sequence; identical to SEQ ID NO: 383
  Description of Artificial Sequence: Synthetic peptide
  MOD_RES (6)..(6): Any L- or D-natural amino acid and any non-natural amino acid; see  specification as filed for detail ed description of substitutions, R-groups  and preferred embodiments
  MOD_RES (9)..(9): Any L- or D-natural amino acid and any non-natural amino acid; see  specification as filed for detail ed description of substitutions, R-groups  and preferred embodiments
  MOD_RES (11)..(11): Any L- or D-natural amino acid and any non-natural amino acid; see  specification as filed for detail ed description of substitutions, R-groups  and preferred embodiments
  MOD_RES (14)..(14): Any L- or D-natural amino acid and any non-natural amino acid; see  specification as filed for detail ed description of substitutions, R-groups  and preferred embodiments
  MOD_RES (18)..(21): Any L- or D-natural or non-natural amino acid, and this range may     encompass 1 or 4 residues; see specification as filed for detailed  description of substitutions, R-groups and preferred emb
  c-term may be amidated

SEQ ID NO: 619 - protein, 34 aa, Artificial Sequence; identical to SEQ ID NO: 384
  Description of Artificial Sequence: Synthetic peptide
  MOD_RES (7)..(7): Any L- or D-natural amino acid and any non-natural amino acid; see  specification as filed for detail ed description of substitutions, R-groups  and preferred embodiments
  MOD_RES (9)..(9): Any L- or D-natural amino acid and any non-natural amino acid; see  specification as filed for detail ed description of substitutions, R-groups  and preferred embodiments
  MOD_RES (11)..(11): Any L- or D-natural amino acid and any non-natural amino acid; see  specification as filed for detail ed description of substitutions, R-groups  and preferred embodiments
  MOD_RES (14)..(14): Any L- or D-natural amino acid and any non-natural amino acid; see  specification as filed for detail ed description of substitutions, R-groups  and preferred embodiments
  MOD_RES (18)..(21): Any L- or D-natural or non-natural amino acid, and this range may     encompass 1 or 4 residues; see specification as filed for detailed  description of substitutions, R-groups and preferred emb
  c-term may be amidated

SEQ ID NO: 620 - protein, 34 aa, Artificial Sequence; identical to SEQ ID NO: 385
  Description of Artificial Sequence: Synthetic peptide
  MOD_RES (8)..(9): Any L- or D-natural amino acid and any non-natural amino acid; see  specification as filed for detail ed description of substitutions, R-groups  and preferred embodiments
  MOD_RES (11)..(11): Any L- or D-natural amino acid and any non-natural amino acid; see  specification as filed for detail ed description of substitutions, R-groups  and preferred embodiments
  MOD_RES (14)..(14): Any L- or D-natural amino acid and any non-natural amino acid; see  specification as filed for detail ed description of substitutions, R-groups  and preferred embodiments
  MOD_RES (18)..(21): Any L- or D-natural or non-natural amino acid, and this range may     encompass 1 or 4 residues; see specification as filed for detailed  description of substitutions, R-groups and preferred emb
  c-term may be amidated

SEQ ID NO: 621 - protein, 34 aa, Artificial Sequence; identical to SEQ ID NO: 386
  Description of Artificial Sequence: Synthetic peptide
  MOD_RES (16)..(16): Any L- or D-natural amino acid and any non-natural amino acid; see  specification as filed for detail ed description of substitutions, R-groups  and preferred embodiments
  MOD_RES (18)..(21): Any L- or D-natural or non-natural amino acid, and this range may     encompass 1 or 4 residues; see specification as filed for detailed  description of substitutions, R-groups and preferred emb
  c-term may be amidated

SEQ ID NO: 622 - protein, 34 aa, Artificial Sequence; identical to SEQ ID NO: 387
  Description of Artificial Sequence: Synthetic peptide
  MOD_RES (1)..(1): Any L- or D-natural amino acid and any non-natural amino acid; see  specification as filed for detail ed description of substitutions, R-groups  and preferred embodiments
  MOD_RES (9)..(9): Any L- or D-natural amino acid and any non-natural amino acid; see  specification as filed for detail ed description of substitutions, R-groups  and preferred embodiments
  MOD_RES (11)..(11): Any L- or D-natural amino acid and any non-natural amino acid; see  specification as filed for detail ed description of substitutions, R-groups  and preferred embodiments
  MOD_RES (16)..(16): Any L- or D-natural amino acid and any non-natural amino acid; see  specification as filed for detail ed description of substitutions, R-groups  and preferred embodiments
  MOD_RES (18)..(21): Any L- or D-natural or non-natural amino acid, and this range may     encompass 1 or 4 residues; see specification as filed for detailed  description of substitutions, R-groups and preferred emb
  c-term may be amidated

SEQ ID NO: 623 - protein, 34 aa, Artificial Sequence; identical to SEQ ID NO: 388
  Description of Artificial Sequence: Synthetic peptide
  MOD_RES (2)..(2): Any L- or D-natural amino acid and any non-natural amino acid; see  specification as filed for detail ed description of substitutions, R-groups  and preferred embodiments
  MOD_RES (9)..(9): Any L- or D-natural amino acid and any non-natural amino acid; see  specification as filed for detail ed description of substitutions, R-groups  and preferred embodiments
  MOD_RES (11)..(11): Any L- or D-natural amino acid and any non-natural amino acid; see  specification as filed for detail ed description of substitutions, R-groups  and preferred embodiments
  MOD_RES (16)..(16): Any L- or D-natural amino acid and any non-natural amino acid; see  specification as filed for detail ed description of substitutions, R-groups  and preferred embodiments
  MOD_RES (18)..(21): Any L- or D-natural or non-natural amino acid, and this range may     encompass 1 or 4 residues; see specification as filed for detailed  description of substitutions, R-groups and preferred emb
  c-term may be amidated

SEQ ID NO: 624 - protein, 34 aa, Artificial Sequence; identical to SEQ ID NO: 389
  Description of Artificial Sequence: Synthetic peptide
  MOD_RES (3)..(3): Any L- or D-natural amino acid and any non-natural amino acid; see  specification as filed for detail ed description of substitutions, R-groups  and preferred embodiments
  MOD_RES (9)..(9): Any L- or D-natural amino acid and any non-natural amino acid; see  specification as filed for detail ed description of substitutions, R-groups  and preferred embodiments
  MOD_RES (11)..(11): Any L- or D-natural amino acid and any non-natural amino acid; see  specification as filed for detail ed description of substitutions, R-groups  and preferred embodiments
  MOD_RES (16)..(16): Any L- or D-natural amino acid and any non-natural amino acid; see  specification as filed for detail ed description of substitutions, R-groups  and preferred embodiments
  MOD_RES (18)..(21): Any L- or D-natural or non-natural amino acid, and this range may     encompass 1 or 4 residues; see specification as filed for detailed  description of substitutions, R-groups and preferred emb
  c-term may be amidated

SEQ ID NO: 625 - protein, 34 aa, Artificial Sequence; identical to SEQ ID NO: 390
  Description of Artificial Sequence: Synthetic peptide
  MOD_RES (4)..(4): Any L- or D-natural amino acid and any non-natural amino acid; see  specification as filed for detail ed description of substitutions, R-groups  and preferred embodiments
  MOD_RES (9)..(9): Any L- or D-natural amino acid and any non-natural amino acid; see  specification as filed for detail ed description of substitutions, R-groups  and preferred embodiments
  MOD_RES (11)..(11): Any L- or D-natural amino acid and any non-natural amino acid; see  specification as filed for detail ed description of substitutions, R-groups  and preferred embodiments
  MOD_RES (16)..(16): Any L- or D-natural amino acid and any non-natural amino acid; see  specification as filed for detail ed description of substitutions, R-groups  and preferred embodiments
  MOD_RES (18)..(21): Any L- or D-natural or non-natural amino acid, and this range may     encompass 1 or 4 residues; see specification as filed for detailed  description of substitutions, R-groups and preferred emb
  c-term may be amidated

SEQ ID NO: 626 - protein, 34 aa, Artificial Sequence; identical to SEQ ID NO: 391
  Description of Artificial Sequence: Synthetic peptide
  MOD_RES (5)..(5): Any L- or D-natural amino acid and any non-natural amino acid; see  specification as filed for detail ed description of substitutions, R-groups  and preferred embodiments
  MOD_RES (9)..(9): Any L- or D-natural amino acid and any non-natural amino acid; see  specification as filed for detail ed description of substitutions, R-groups  and preferred embodiments
  MOD_RES (11)..(11): Any L- or D-natural amino acid and any non-natural amino acid; see  specification as filed for detail ed description of substitutions, R-groups  and preferred embodiments
  MOD_RES (16)..(16): Any L- or D-natural amino acid and any non-natural amino acid; see  specification as filed for detail ed description of substitutions, R-groups  and preferred embodiments
  MOD_RES (18)..(21): Any L- or D-natural or non-natural amino acid, and this range may     encompass 1 or 4 residues; see specification as filed for detailed  description of substitutions, R-groups and preferred emb
  c-term may be amidated

SEQ ID NO: 627 - protein, 34 aa, Artificial Sequence; identical to SEQ ID NO: 392
  Description of Artificial Sequence: Synthetic peptide
  MOD_RES (6)..(6): Any L- or D-natural amino acid and any non-natural amino acid; see  specification as filed for detail ed description of substitutions, R-groups  and preferred embodiments
  MOD_RES (9)..(9): Any L- or D-natural amino acid and any non-natural amino acid; see  specification as filed for detail ed description of substitutions, R-groups  and preferred embodiments
  MOD_RES (11)..(11): Any L- or D-natural amino acid and any non-natural amino acid; see  specification as filed for detail ed description of substitutions, R-groups  and preferred embodiments
  MOD_RES (16)..(16): Any L- or D-natural amino acid and any non-natural amino acid; see  specification as filed for detail ed description of substitutions, R-groups  and preferred embodiments
  MOD_RES (18)..(21): Any L- or D-natural or non-natural amino acid, and this range may     encompass 1 or 4 residues; see specification as filed for detailed  description of substitutions, R-groups and preferred emb
  c-term may be amidated

SEQ ID NO: 628 - protein, 34 aa, Artificial Sequence; identical to SEQ ID NO: 393
  Description of Artificial Sequence: Synthetic peptide
  MOD_RES (7)..(7): Any L- or D-natural amino acid and any non-natural amino acid; see  specification as filed for detail ed description of substitutions, R-groups  and preferred embodiments
  MOD_RES (9)..(9): Any L- or D-natural amino acid and any non-natural amino acid; see  specification as filed for detail ed description of substitutions, R-groups  and preferred embodiments
  MOD_RES (11)..(11): Any L- or D-natural amino acid and any non-natural amino acid; see  specification as filed for detail ed description of substitutions, R-groups  and preferred embodiments
  MOD_RES (16)..(16): Any L- or D-natural amino acid and any non-natural amino acid; see  specification as filed for detail ed description of substitutions, R-groups  and preferred embodiments
  MOD_RES (18)..(21): Any L- or D-natural or non-natural amino acid, and this range may     encompass 1 or 4 residues; see specification as filed for detailed  description of substitutions, R-groups and preferred emb
  c-term may be amidated

SEQ ID NO: 629 - protein, 34 aa, Artificial Sequence; identical to SEQ ID NO: 394
  Description of Artificial Sequence: Synthetic peptide
  MOD_RES (8)..(9): Any L- or D-natural amino acid and any non-natural amino acid; see  specification as filed for detail ed description of substitutions, R-groups  and preferred embodiments
  MOD_RES (11)..(11): Any L- or D-natural amino acid and any non-natural amino acid; see  specification as filed for detail ed description of substitutions, R-groups  and preferred embodiments
  MOD_RES (16)..(16): Any L- or D-natural amino acid and any non-natural amino acid; see  specification as filed for detail ed description of substitutions, R-groups  and preferred embodiments
  MOD_RES (18)..(21): Any L- or D-natural or non-natural amino acid, and this range may     encompass 1 or 4 residues; see specification as filed for detailed  description of substitutions, R-groups and preferred emb
  c-term may be amidated

SEQ ID NO: 630 - protein, 34 aa, Artificial Sequence; identical to SEQ ID NO: 395
  Description of Artificial Sequence: Synthetic peptide
  MOD_RES (17)..(17): Any L- or D-natural amino acid and any non-natural amino acid; see  specification as filed for detail ed description of substitutions, R-groups  and preferred embodiments
  MOD_RES (18)..(21): Any L- or D-natural or non-natural amino acid, and this range may     encompass 1 or 4 residues; see specification as filed for detailed  description of substitutions, R-groups and preferred emb
  c-term may be amidated

SEQ ID NO: 631 - protein, 34 aa, Artificial Sequence; identical to SEQ ID NO: 396
  Description of Artificial Sequence: Synthetic peptide
  MOD_RES (1)..(1): Any L- or D-natural amino acid and any non-natural amino acid; see  specification as filed for detail ed description of substitutions, R-groups  and preferred embodiments
  MOD_RES (9)..(9): Any L- or D-natural amino acid and any non-natural amino acid; see  specification as filed for detail ed description of substitutions, R-groups  and preferred embodiments
  MOD_RES (11)..(11): Any L- or D-natural amino acid and any non-natural amino acid; see  specification as filed for detail ed description of substitutions, R-groups  and preferred embodiments
  MOD_RES (17)..(17): Any L- or D-natural amino acid and any non-natural amino acid; see  specification as filed for detail ed description of substitutions, R-groups  and preferred embodiments
  MOD_RES (18)..(21): Any L- or D-natural or non-natural amino acid, and this range may     encompass 1 or 4 residues; see specification as filed for detailed  description of substitutions, R-groups and preferred emb
  c-term may be amidated

SEQ ID NO: 632 - protein, 34 aa, Artificial Sequence; identical to SEQ ID NO: 397
  Description of Artificial Sequence: Synthetic peptide
  MOD_RES (2)..(2): Any L- or D-natural amino acid and any non-natural amino acid; see  specification as filed for detail ed description of substitutions, R-groups  and preferred embodiments
  MOD_RES (9)..(9): Any L- or D-natural amino acid and any non-natural amino acid; see  specification as filed for detail ed description of substitutions, R-groups  and preferred embodiments
  MOD_RES (11)..(11): Any L- or D-natural amino acid and any non-natural amino acid; see  specification as filed for detail ed description of substitutions, R-groups  and preferred embodiments
  MOD_RES (17)..(17): Any L- or D-natural amino acid and any non-natural amino acid; see  specification as filed for detail ed description of substitutions, R-groups  and preferred embodiments
  MOD_RES (18)..(21): Any L- or D-natural or non-natural amino acid, and this range may     encompass 1 or 4 residues; see specification as filed for detailed  description of substitutions, R-groups and preferred emb
  c-term may be amidated

SEQ ID NO: 633 - protein, 34 aa, Artificial Sequence; identical to SEQ ID NO: 398
  Description of Artificial Sequence: Synthetic peptide
  MOD_RES (3)..(3): Any L- or D-natural amino acid and any non-natural amino acid; see  specification as filed for detail ed description of substitutions, R-groups  and preferred embodiments
  MOD_RES (9)..(9): Any L- or D-natural amino acid and any non-natural amino acid; see  specification as filed for detail ed description of substitutions, R-groups  and preferred embodiments
  MOD_RES (11)..(11): Any L- or D-natural amino acid and any non-natural amino acid; see  specification as filed for detail ed description of substitutions, R-groups  and preferred embodiments
  MOD_RES (17)..(17): Any L- or D-natural amino acid and any non-natural amino acid; see  specification as filed for detail ed description of substitutions, R-groups  and preferred embodiments
  MOD_RES (18)..(21): Any L- or D-natural or non-natural amino acid, and this range may     encompass 1 or 4 residues; see specification as filed for detailed  description of substitutions, R-groups and preferred emb
  c-term may be amidated

SEQ ID NO: 634 - protein, 34 aa, Artificial Sequence; identical to SEQ ID NO: 399
  Description of Artificial Sequence: Synthetic peptide
  MOD_RES (4)..(4): Any L- or D-natural amino acid and any non-natural amino acid; see  specification as filed for detail ed description of substitutions, R-groups  and preferred embodiments
  MOD_RES (9)..(9): Any L- or D-natural amino acid and any non-natural amino acid; see  specification as filed for detail ed description of substitutions, R-groups  and preferred embodiments
  MOD_RES (11)..(11): Any L- or D-natural amino acid and any non-natural amino acid; see  specification as filed for detail ed description of substitutions, R-groups  and preferred embodiments
  MOD_RES (17)..(17): Any L- or D-natural amino acid and any non-natural amino acid; see  specification as filed for detail ed description of substitutions, R-groups  and preferred embodiments
  MOD_RES (18)..(21): Any L- or D-natural or non-natural amino acid, and this range may     encompass 1 or 4 residues; see specification as filed for detailed  description of substitutions, R-groups and preferred emb
  c-term may be amidated

SEQ ID NO: 635 - protein, 34 aa, Artificial Sequence; identical to SEQ ID NO: 400
  Description of Artificial Sequence: Synthetic peptide
  MOD_RES (5)..(5): Any L- or D-natural amino acid and any non-natural amino acid; see  specification as filed for detail ed description of substitutions, R-groups  and preferred embodiments
  MOD_RES (9)..(9): Any L- or D-natural amino acid and any non-natural amino acid; see  specification as filed for detail ed description of substitutions, R-groups  and preferred embodiments
  MOD_RES (11)..(11): Any L- or D-natural amino acid and any non-natural amino acid; see  specification as filed for detail ed description of substitutions, R-groups  and preferred embodiments
  MOD_RES (17)..(17): Any L- or D-natural amino acid and any non-natural amino acid; see  specification as filed for detail ed description of substitutions, R-groups  and preferred embodiments
  MOD_RES (18)..(21): Any L- or D-natural or non-natural amino acid, and this range may     encompass 1 or 4 residues; see specification as filed for detailed  description of substitutions, R-groups and preferred emb
  c-term may be amidated

SEQ ID NO: 636 - protein, 34 aa, Artificial Sequence; identical to SEQ ID NO: 401
  Description of Artificial Sequence: Synthetic peptide
  MOD_RES (6)..(6): Any L- or D-natural amino acid and any non-natural amino acid; see  specification as filed for detail ed description of substitutions, R-groups  and preferred embodiments
  MOD_RES (9)..(9): Any L- or D-natural amino acid and any non-natural amino acid; see  specification as filed for detail ed description of substitutions, R-groups  and preferred embodiments
  MOD_RES (11)..(11): Any L- or D-natural amino acid and any non-natural amino acid; see  specification as filed for detail ed description of substitutions, R-groups  and preferred embodiments
  MOD_RES (17)..(17): Any L- or D-natural amino acid and any non-natural amino acid; see  specification as filed for detail ed description of substitutions, R-groups  and preferred embodiments
  MOD_RES (18)..(21): Any L- or D-natural or non-natural amino acid, and this range may     encompass 1 or 4 residues; see specification as filed for detailed  description of substitutions, R-groups and preferred emb
  c-term may be amidated

SEQ ID NO: 637 - protein, 34 aa, Artificial Sequence; identical to SEQ ID NO: 402
  Description of Artificial Sequence: Synthetic peptide
  MOD_RES (7)..(7): Any L- or D-natural amino acid and any non-natural amino acid; see  specification as filed for detail ed description of substitutions, R-groups  and preferred embodiments
  MOD_RES (9)..(9): Any L- or D-natural amino acid and any non-natural amino acid; see  specification as filed for detail ed description of substitutions, R-groups  and preferred embodiments
  MOD_RES (11)..(11): Any L- or D-natural amino acid and any non-natural amino acid; see  specification as filed for detail ed description of substitutions, R-groups  and preferred embodiments
  MOD_RES (17)..(17): Any L- or D-natural amino acid and any non-natural amino acid; see  specification as filed for detail ed description of substitutions, R-groups  and preferred embodiments
  MOD_RES (18)..(21): Any L- or D-natural or non-natural amino acid, and this range may     encompass 1 or 4 residues; see specification as filed for detailed  description of substitutions, R-groups and preferred emb
  c-term may be amidated

SEQ ID NO: 638 - protein, 34 aa, Artificial Sequence; identical to SEQ ID NO: 403
  Description of Artificial Sequence: Synthetic peptide
  MOD_RES (8)..(9): Any L- or D-natural amino acid and any non-natural amino acid; see  specification as filed for detail ed description of substitutions, R-groups  and preferred embodiments
  MOD_RES (11)..(11): Any L- or D-natural amino acid and any non-natural amino acid; see  specification as filed for detail ed description of substitutions, R-groups  and preferred embodiments
  MOD_RES (17)..(17): Any L- or D-natural amino acid and any non-natural amino acid; see  specification as filed for detail ed description of substitutions, R-groups  and preferred embodiments
  MOD_RES (18)..(21): Any L- or D-natural or non-natural amino acid, and this range may     encompass 1 or 4 residues; see specification as filed for detailed  description of substitutions, R-groups and preferred emb
  c-term may be amidated

SEQ ID NO: 639 - protein, 31 aa, Artificial Sequence; identical to SEQ ID NO: 260
  Description of Artificial Sequence: Synthetic peptide
  MOD_RES (15)..(18): Any L- or D-natural or non-natural amino acid, and this range may     encompass 1 or 4 residues; see specification as filed for detailed  description of substitutions, R-groups and preferred emb
  c-term may be amidated

SEQ ID NO: 640 - protein, 31 aa, Artificial Sequence; identical to SEQ ID NO: 261
  Description of Artificial Sequence: Synthetic peptide
  MOD_RES (1)..(1): Any L- or D-natural amino acid and any non-natural amino acid; see  specification as filed for detail ed description of substitutions, R-groups  and preferred embodiments
  MOD_RES (9)..(9): Any L- or D-natural amino acid and any non-natural amino acid; see  specification as filed for detail ed description of substitutions, R-groups  and preferred embodiments
  MOD_RES (11)..(11): Any L- or D-natural amino acid and any non-natural amino acid; see  specification as filed for detail ed description of substitutions, R-groups  and preferred embodiments
  MOD_RES (15)..(18): Any L- or D-natural or non-natural amino acid, and this range may     encompass 1 or 4 residues; see specification as filed for detailed  description of substitutions, R-groups and preferred emb
  c-term may be amidated

SEQ ID NO: 641 - protein, 31 aa, Artificial Sequence; identical to SEQ ID NO: 262
  Description of Artificial Sequence: Synthetic peptide
  MOD_RES (2)..(2): Any L- or D-natural amino acid and any non-natural amino acid; see  specification as filed for detail ed description of substitutions, R-groups  and preferred embodiments
  MOD_RES (9)..(9): Any L- or D-natural amino acid and any non-natural amino acid; see  specification as filed for detail ed description of substitutions, R-groups  and preferred embodiments
  MOD_RES (11)..(11): Any L- or D-natural amino acid and any non-natural amino acid; see  specification as filed for detail ed description of substitutions, R-groups  and preferred embodiments
  MOD_RES (15)..(18): Any L- or D-natural or non-natural amino acid, and this range may     encompass 1 or 4 residues; see specification as filed for detailed  description of substitutions, R-groups and preferred emb
  c-term may be amidated

SEQ ID NO: 642 - protein, 31 aa, Artificial Sequence; identical to SEQ ID NO: 263
  Description of Artificial Sequence: Synthetic peptide
  MOD_RES (3)..(3): Any L- or D-natural amino acid and any non-natural amino acid; see  specification as filed for detail ed description of substitutions, R-groups  and preferred embodiments
  MOD_RES (9)..(9): Any L- or D-natural amino acid and any non-natural amino acid; see  specification as filed for detail ed description of substitutions, R-groups  and preferred embodiments
  MOD_RES (11)..(11): Any L- or D-natural amino acid and any non-natural amino acid; see  specification as filed for detail ed description of substitutions, R-groups  and preferred embodiments
  MOD_RES (15)..(18): Any L- or D-natural or non-natural amino acid, and this range may     encompass 1 or 4 residues; see specification as filed for detailed  description of substitutions, R-groups and preferred emb
  c-term may be amidated

SEQ ID NO: 643 - protein, 31 aa, Artificial Sequence; identical to SEQ ID NO: 264
  Description of Artificial Sequence: Synthetic peptide
  MOD_RES (4)..(4): Any L- or D-natural amino acid and any non-natural amino acid; see  specification as filed for detail ed description of substitutions, R-groups  and preferred embodiments
  MOD_RES (9)..(9): Any L- or D-natural amino acid and any non-natural amino acid; see  specification as filed for detail ed description of substitutions, R-groups  and preferred embodiments
  MOD_RES (11)..(11): Any L- or D-natural amino acid and any non-natural amino acid; see  specification as filed for detail ed description of substitutions, R-groups  and preferred embodiments
  MOD_RES (15)..(18): Any L- or D-natural or non-natural amino acid, and this range may     encompass 1 or 4 residues; see specification as filed for detailed  description of substitutions, R-groups and preferred emb
  c-term may be amidated

SEQ ID NO: 644 - protein, 31 aa, Artificial Sequence; identical to SEQ ID NO: 265
  Description of Artificial Sequence: Synthetic peptide
  MOD_RES (5)..(5): Any L- or D-natural amino acid and any non-natural amino acid; see  specification as filed for detail ed description of substitutions, R-groups  and preferred embodiments
  MOD_RES (9)..(9): Any L- or D-natural amino acid and any non-natural amino acid; see  specification as filed for detail ed description of substitutions, R-groups  and preferred embodiments
  MOD_RES (11)..(11): Any L- or D-natural amino acid and any non-natural amino acid; see  specification as filed for detail ed description of substitutions, R-groups  and preferred embodiments
  MOD_RES (15)..(18): Any L- or D-natural or non-natural amino acid, and this range may     encompass 1 or 4 residues; see specification as filed for detailed  description of substitutions, R-groups and preferred emb
  c-term may be amidated

SEQ ID NO: 645 - protein, 31 aa, Artificial Sequence; identical to SEQ ID NO: 266
  Description of Artificial Sequence: Synthetic peptide
  MOD_RES (6)..(6): Any L- or D-natural amino acid and any non-natural amino acid; see  specification as filed for detail ed description of substitutions, R-groups  and preferred embodiments
  MOD_RES (9)..(9): Any L- or D-natural amino acid and any non-natural amino acid; see  specification as filed for detail ed description of substitutions, R-groups  and preferred embodiments
  MOD_RES (11)..(11): Any L- or D-natural amino acid and any non-natural amino acid; see  specification as filed for detail ed description of substitutions, R-groups  and preferred embodiments
  MOD_RES (15)..(18): Any L- or D-natural or non-natural amino acid, and this range may     encompass 1 or 4 residues; see specification as filed for detailed  description of substitutions, R-groups and preferred emb
  c-term may be amidated

SEQ ID NO: 646 - protein, 31 aa, Artificial Sequence; identical to SEQ ID NO: 267
  Description of Artificial Sequence: Synthetic peptide
  MOD_RES (7)..(7): Any L- or D-natural amino acid and any non-natural amino acid; see  specification as filed for detail ed description of substitutions, R-groups  and preferred embodiments
  MOD_RES (9)..(9): Any L- or D-natural amino acid and any non-natural amino acid; see  specification as filed for detail ed description of substitutions, R-groups  and preferred embodiments
  MOD_RES (11)..(11): Any L- or D-natural amino acid and any non-natural amino acid; see  specification as filed for detail ed description of substitutions, R-groups  and preferred embodiments
  MOD_RES (15)..(18): Any L- or D-natural or non-natural amino acid, and this range may     encompass 1 or 4 residues; see specification as filed for detailed  description of substitutions, R-groups and preferred emb
  c-term may be amidated

SEQ ID NO: 647 - protein, 31 aa, Artificial Sequence; identical to SEQ ID NO: 268
  Description of Artificial Sequence: Synthetic peptide
  MOD_RES (8)..(9): Any L- or D-natural amino acid and any non-natural amino acid; see  specification as filed for detail ed description of substitutions, R-groups  and preferred embodiments
  MOD_RES (11)..(11): Any L- or D-natural amino acid and any non-natural amino acid; see  specification as filed for detail ed description of substitutions, R-groups  and preferred embodiments
  MOD_RES (15)..(18): Any L- or D-natural or non-natural amino acid, and this range may     encompass 1 or 4 residues; see specification as filed for detailed  description of substitutions, R-groups and preferred emb
  c-term may be amidated

SEQ ID NO: 648 - protein, 31 aa, Artificial Sequence; identical to SEQ ID NO: 269
  Description of Artificial Sequence: Synthetic peptide
  MOD_RES (12)..(12): Any L- or D-natural amino acid and any non-natural amino acid; see  specification as filed for detail ed description of substitutions, R-groups  and preferred embodiments
  MOD_RES (15)..(18): Any L- or D-natural or non-natural amino acid, and this range may     encompass 1 or 4 residues; see specification as filed for detailed  description of substitutions, R-groups and preferred emb
  c-term may be amidated

SEQ ID NO: 649 - protein, 31 aa, Artificial Sequence; identical to SEQ ID NO: 270
  Description of Artificial Sequence: Synthetic peptide
  MOD_RES (1)..(1): Any L- or D-natural amino acid and any non-natural amino acid; see  specification as filed for detail ed description of substitutions, R-groups  and preferred embodiments
  MOD_RES (9)..(9): Any L- or D-natural amino acid and any non-natural amino acid; see  specification as filed for detail ed description of substitutions, R-groups  and preferred embodiments
  MOD_RES (11)..(12): Any L- or D-natural amino acid and any non-natural amino acid; see  specification as filed for detail ed description of substitutions, R-groups  and preferred embodiments
  MOD_RES (15)..(18): Any L- or D-natural or non-natural amino acid, and this range may     encompass 1 or 4 residues; see specification as filed for detailed  description of substitutions, R-groups and preferred emb
  c-term may be amidated

SEQ ID NO: 650 - protein, 31 aa, Artificial Sequence; identical to SEQ ID NO: 271
  Description of Artificial Sequence: Synthetic peptide
  MOD_RES (2)..(2): Any L- or D-natural amino acid and any non-natural amino acid; see  specification as filed for detail ed description of substitutions, R-groups  and preferred embodiments
  MOD_RES (9)..(9): Any L- or D-natural amino acid and any non-natural amino acid; see  specification as filed for detail ed description of substitutions, R-groups  and preferred embodiments
  MOD_RES (11)..(12): Any L- or D-natural amino acid and any non-natural amino acid; see  specification as filed for detail ed description of substitutions, R-groups  and preferred embodiments
  MOD_RES (15)..(18): Any L- or D-natural or non-natural amino acid, and this range may     encompass 1 or 4 residues; see specification as filed for detailed  description of substitutions, R-groups and preferred emb
  c-term may be amidated

SEQ ID NO: 651 - protein, 31 aa, Artificial Sequence; identical to SEQ ID NO: 272
  Description of Artificial Sequence: Synthetic peptide
  MOD_RES (3)..(3): Any L- or D-natural amino acid and any non-natural amino acid; see  specification as filed for detail ed description of substitutions, R-groups  and preferred embodiments
  MOD_RES (9)..(9): Any L- or D-natural amino acid and any non-natural amino acid; see  specification as filed for detail ed description of substitutions, R-groups  and preferred embodiments
  MOD_RES (11)..(12): Any L- or D-natural amino acid and any non-natural amino acid; see  specification as filed for detail ed description of substitutions, R-groups  and preferred embodiments
  MOD_RES (15)..(18): Any L- or D-natural or non-natural amino acid, and this range may     encompass 1 or 4 residues; see specification as filed for detailed  description of substitutions, R-groups and preferred emb
  c-term may be amidated

SEQ ID NO: 652 - protein, 31 aa, Artificial Sequence; identical to SEQ ID NO: 273
  Description of Artificial Sequence: Synthetic peptide
  MOD_RES (4)..(4): Any L- or D-natural amino acid and any non-natural amino acid; see  specification as filed for detail ed description of substitutions, R-groups  and preferred embodiments
  MOD_RES (9)..(9): Any L- or D-natural amino acid and any non-natural amino acid; see  specification as filed for detail ed description of substitutions, R-groups  and preferred embodiments
  MOD_RES (11)..(12): Any L- or D-natural amino acid and any non-natural amino acid; see  specification as filed for detail ed description of substitutions, R-groups  and preferred embodiments
  MOD_RES (15)..(18): Any L- or D-natural or non-natural amino acid, and this range may     encompass 1 or 4 residues; see specification as filed for detailed  description of substitutions, R-groups and preferred emb
  c-term may be amidated

SEQ ID NO: 653 - protein, 31 aa, Artificial Sequence; identical to SEQ ID NO: 274
  Description of Artificial Sequence: Synthetic peptide
  MOD_RES (5)..(5): Any L- or D-natural amino acid and any non-natural amino acid; see  specification as filed for detail ed description of substitutions, R-groups  and preferred embodiments
  MOD_RES (9)..(9): Any L- or D-natural amino acid and any non-natural amino acid; see  specification as filed for detail ed description of substitutions, R-groups  and preferred embodiments
  MOD_RES (11)..(12): Any L- or D-natural amino acid and any non-natural amino acid; see  specification as filed for detail ed description of substitutions, R-groups  and preferred embodiments
  MOD_RES (15)..(18): Any L- or D-natural or non-natural amino acid, and this range may     encompass 1 or 4 residues; see specification as filed for detailed  description of substitutions, R-groups and preferred emb
  c-term may be amidated

SEQ ID NO: 654 - protein, 31 aa, Artificial Sequence; identical to SEQ ID NO: 275
  Description of Artificial Sequence: Synthetic peptide
  MOD_RES (6)..(6): Any L- or D-natural amino acid and any non-natural amino acid; see  specification as filed for detail ed description of substitutions, R-groups  and preferred embodiments
  MOD_RES (9)..(9): Any L- or D-natural amino acid and any non-natural amino acid; see  specification as filed for detail ed description of substitutions, R-groups  and preferred embodiments
  MOD_RES (11)..(12): Any L- or D-natural amino acid and any non-natural amino acid; see  specification as filed for detail ed description of substitutions, R-groups  and preferred embodiments
  MOD_RES (15)..(18): Any L- or D-natural or non-natural amino acid, and this range may     encompass 1 or 4 residues; see specification as filed for detailed  description of substitutions, R-groups and preferred emb
  c-term may be amidated

SEQ ID NO: 655 - protein, 31 aa, Artificial Sequence; identical to SEQ ID NO: 276
  Description of Artificial Sequence: Synthetic peptide
  MOD_RES (7)..(7): Any L- or D-natural amino acid and any non-natural amino acid; see  specification as filed for detail ed description of substitutions, R-groups  and preferred embodiments
  MOD_RES (9)..(9): Any L- or D-natural amino acid and any non-natural amino acid; see  specification as filed for detail ed description of substitutions, R-groups  and preferred embodiments
  MOD_RES (11)..(12): Any L- or D-natural amino acid and any non-natural amino acid; see  specification as filed for detail ed description of substitutions, R-groups  and preferred embodiments
  MOD_RES (15)..(18): Any L- or D-natural or non-natural amino acid, and this range may     encompass 1 or 4 residues; see specification as filed for detailed  description of substitutions, R-groups and preferred emb
  c-term may be amidated

SEQ ID NO: 656 - protein, 31 aa, Artificial Sequence; identical to SEQ ID NO: 277
  Description of Artificial Sequence: Synthetic peptide
  MOD_RES (8)..(9): Any L- or D-natural amino acid and any non-natural amino acid; see  specification as filed for detail ed description of substitutions, R-groups  and preferred embodiments
  MOD_RES (11)..(12): Any L- or D-natural amino acid and any non-natural amino acid; see  specification as filed for detail ed description of substitutions, R-groups  and preferred embodiments
  MOD_RES (15)..(18): Any L- or D-natural or non-natural amino acid, and this range may     encompass 1 or 4 residues; see specification as filed for detailed  description of substitutions, R-groups and preferred emb
  c-term may be amidated

SEQ ID NO: 657 - protein, 31 aa, Artificial Sequence; identical to SEQ ID NO: 278
  Description of Artificial Sequence: Synthetic peptide
  MOD_RES (13)..(13): Any L- or D-natural amino acid and any non-natural amino acid; see  specification as filed for detail ed description of substitutions, R-groups  and preferred embodiments
  MOD_RES (15)..(18): Any L- or D-natural or non-natural amino acid, and this range may     encompass 1 or 4 residues; see specification as filed for detailed  description of substitutions, R-groups and preferred emb
  c-term may be amidated

SEQ ID NO: 658 - protein, 31 aa, Artificial Sequence; identical to SEQ ID NO: 279
  Description of Artificial Sequence: Synthetic peptide
  MOD_RES (1)..(1): Any L- or D-natural amino acid and any non-natural amino acid; see  specification as filed for detail ed description of substitutions, R-groups  and preferred embodiments
  MOD_RES (9)..(9): Any L- or D-natural amino acid and any non-natural amino acid; see  specification as filed for detail ed description of substitutions, R-groups  and preferred embodiments
  MOD_RES (11)..(11): Any L- or D-natural amino acid and any non-natural amino acid; see  specification as filed for detail ed description of substitutions, R-groups  and preferred embodiments
  MOD_RES (13)..(13): Any L- or D-natural amino acid and any non-natural amino acid; see  specification as filed for detail ed description of substitutions, R-groups  and preferred embodiments
  MOD_RES (15)..(18): Any L- or D-natural or non-natural amino acid, and this range may     encompass 1 or 4 residues; see specification as filed for detailed  description of substitutions, R-groups and preferred emb
  c-term may be amidated

SEQ ID NO: 659 - protein, 31 aa, Artificial Sequence; identical to SEQ ID NO: 280
  Description of Artificial Sequence: Synthetic peptide
  MOD_RES (2)..(2): Any L- or D-natural amino acid and any non-natural amino acid; see  specification as filed for detail ed description of substitutions, R-groups  and preferred embodiments
  MOD_RES (9)..(9): Any L- or D-natural amino acid and any non-natural amino acid; see  specification as filed for detail ed description of substitutions, R-groups  and preferred embodiments
  MOD_RES (11)..(11): Any L- or D-natural amino acid and any non-natural amino acid; see  specification as filed for detail ed description of substitutions, R-groups  and preferred embodiments
  MOD_RES (13)..(13): Any L- or D-natural amino acid and any non-natural amino acid; see  specification as filed for detail ed description of substitutions, R-groups  and preferred embodiments
  MOD_RES (15)..(18): Any L- or D-natural or non-natural amino acid, and this range may     encompass 1 or 4 residues; see specification as filed for detailed  description of substitutions, R-groups and preferred emb
  c-term may be amidated

SEQ ID NO: 660 - protein, 31 aa, Artificial Sequence; identical to SEQ ID NO: 281
  Description of Artificial Sequence: Synthetic peptide
  MOD_RES (3)..(3): Any L- or D-natural amino acid and any non-natural amino acid; see  specification as filed for detail ed description of substitutions, R-groups  and preferred embodiments
  MOD_RES (9)..(9): Any L- or D-natural amino acid and any non-natural amino acid; see  specification as filed for detail ed description of substitutions, R-groups  and preferred embodiments
  MOD_RES (11)..(11): Any L- or D-natural amino acid and any non-natural amino acid; see  specification as filed for detail ed description of substitutions, R-groups  and preferred embodiments
  MOD_RES (13)..(13): Any L- or D-natural amino acid and any non-natural amino acid; see  specification as filed for detail ed description of substitutions, R-groups  and preferred embodiments
  MOD_RES (15)..(18): Any L- or D-natural or non-natural amino acid, and this range may     encompass 1 or 4 residues; see specification as filed for detailed  description of substitutions, R-groups and preferred emb
  c-term may be amidated

SEQ ID NO: 661 - protein, 31 aa, Artificial Sequence; identical to SEQ ID NO: 282
  Description of Artificial Sequence: Synthetic peptide
  MOD_RES (4)..(4): Any L- or D-natural amino acid and any non-natural amino acid; see  specification as filed for detail ed description of substitutions, R-groups  and preferred embodiments
  MOD_RES (9)..(9): Any L- or D-natural amino acid and any non-natural amino acid; see  specification as filed for detail ed description of substitutions, R-groups  and preferred embodiments
  MOD_RES (11)..(11): Any L- or D-natural amino acid and any non-natural amino acid; see  specification as filed for detail ed description of substitutions, R-groups  and preferred embodiments
  MOD_RES (13)..(13): Any L- or D-natural amino acid and any non-natural amino acid; see  specification as filed for detail ed description of substitutions, R-groups  and preferred embodiments
  MOD_RES (15)..(18): Any L- or D-natural or non-natural amino acid, and this range may     encompass 1 or 4 residues; see specification as filed for detailed  description of substitutions, R-groups and preferred emb
  c-term may be amidated

SEQ ID NO: 662 - protein, 31 aa, Artificial Sequence; identical to SEQ ID NO: 283
  Description of Artificial Sequence: Synthetic peptide
  MOD_RES (5)..(5): Any L- or D-natural amino acid and any non-natural amino acid; see  specification as filed for detail ed description of substitutions, R-groups  and preferred embodiments
  MOD_RES (9)..(9): Any L- or D-natural amino acid and any non-natural amino acid; see  specification as filed for detail ed description of substitutions, R-groups  and preferred embodiments
  MOD_RES (11)..(11): Any L- or D-natural amino acid and any non-natural amino acid; see  specification as filed for detail ed description of substitutions, R-groups  and preferred embodiments
  MOD_RES (13)..(13): Any L- or D-natural amino acid and any non-natural amino acid; see  specification as filed for detail ed description of substitutions, R-groups  and preferred embodiments
  MOD_RES (15)..(18): Any L- or D-natural or non-natural amino acid, and this range may     encompass 1 or 4 residues; see specification as filed for detailed  description of substitutions, R-groups and preferred emb
  c-term may be amidated

SEQ ID NO: 663 - protein, 31 aa, Artificial Sequence; identical to SEQ ID NO: 284
  Description of Artificial Sequence: Synthetic peptide
  MOD_RES (6)..(6): Any L- or D-natural amino acid and any non-natural amino acid; see  specification as filed for detail ed description of substitutions, R-groups  and preferred embodiments
  MOD_RES (9)..(9): Any L- or D-natural amino acid and any non-natural amino acid; see  specification as filed for detail ed description of substitutions, R-groups  and preferred embodiments
  MOD_RES (11)..(11): Any L- or D-natural amino acid and any non-natural amino acid; see  specification as filed for detail ed description of substitutions, R-groups  and preferred embodiments
  MOD_RES (13)..(13): Any L- or D-natural amino acid and any non-natural amino acid; see  specification as filed for detail ed description of substitutions, R-groups  and preferred embodiments
  MOD_RES (15)..(18): Any L- or D-natural or non-natural amino acid, and this range may     encompass 1 or 4 residues; see specification as filed for detailed  description of substitutions, R-groups and preferred emb
  c-term may be amidated

SEQ ID NO: 664 - protein, 31 aa, Artificial Sequence; identical to SEQ ID NO: 285
  Description of Artificial Sequence: Synthetic peptide
  MOD_RES (7)..(7): Any L- or D-natural amino acid and any non-natural amino acid; see  specification as filed for detail ed description of substitutions, R-groups  and preferred embodiments
  MOD_RES (9)..(9): Any L- or D-natural amino acid and any non-natural amino acid; see  specification as filed for detail ed description of substitutions, R-groups  and preferred embodiments
  MOD_RES (11)..(11): Any L- or D-natural amino acid and any non-natural amino acid; see  specification as filed for detail ed description of substitutions, R-groups  and preferred embodiments
  MOD_RES (13)..(13): Any L- or D-natural amino acid and any non-natural amino acid; see  specification as filed for detail ed description of substitutions, R-groups  and preferred embodiments
  MOD_RES (15)..(18): Any L- or D-natural or non-natural amino acid, and this range may     encompass 1 or 4 residues; see specification as filed for detailed  description of substitutions, R-groups and preferred emb
  c-term may be amidated

SEQ ID NO: 665 - protein, 31 aa, Artificial Sequence; identical to SEQ ID NO: 286
  Description of Artificial Sequence: Synthetic peptide
  MOD_RES (8)..(9): Any L- or D-natural amino acid and any non-natural amino acid; see  specification as filed for detail ed description of substitutions, R-groups  and preferred embodiments
  MOD_RES (11)..(11): Any L- or D-natural amino acid and any non-natural amino acid; see  specification as filed for detail ed description of substitutions, R-groups  and preferred embodiments
  MOD_RES (13)..(13): Any L- or D-natural amino acid and any non-natural amino acid; see  specification as filed for detail ed description of substitutions, R-groups  and preferred embodiments
  MOD_RES (15)..(18): Any L- or D-natural or non-natural amino acid, and this range may     encompass 1 or 4 residues; see specification as filed for detailed  description of substitutions, R-groups and preferred emb
  c-term may be amidated

SEQ ID NO: 666 - protein, 31 aa, Artificial Sequence; identical to SEQ ID NO: 287
  Description of Artificial Sequence: Synthetic peptide
  MOD_RES (14)..(14): Any L- or D-natural amino acid and any non-natural amino acid; see  specification as filed for detail ed description of substitutions, R-groups  and preferred embodiments
  MOD_RES (15)..(18): Any L- or D-natural or non-natural amino acid, and this range may     encompass 1 or 4 residues; see specification as filed for detailed  description of substitutions, R-groups and preferred emb
  c-term may be amidated

SEQ ID NO: 667 - protein, 31 aa, Artificial Sequence; identical to SEQ ID NO: 288
  Description of Artificial Sequence: Synthetic peptide
  MOD_RES (1)..(1): Any L- or D-natural amino acid and any non-natural amino acid; see  specification as filed for detail ed description of substitutions, R-groups  and preferred embodiments
  MOD_RES (9)..(9): Any L- or D-natural amino acid and any non-natural amino acid; see  specification as filed for detail ed description of substitutions, R-groups  and preferred embodiments
  MOD_RES (11)..(11): Any L- or D-natural amino acid and any non-natural amino acid; see  specification as filed for detail ed description of substitutions, R-groups  and preferred embodiments
  MOD_RES (14)..(14): Any L- or D-natural amino acid and any non-natural amino acid; see  specification as filed for detail ed description of substitutions, R-groups  and preferred embodiments
  MOD_RES (15)..(18): Any L- or D-natural or non-natural amino acid, and this range may     encompass 1 or 4 residues; see specification as filed for detailed  description of substitutions, R-groups and preferred emb
  c-term may be amidated

SEQ ID NO: 668 - protein, 31 aa, Artificial Sequence; identical to SEQ ID NO: 289
  Description of Artificial Sequence: Synthetic peptide
  MOD_RES (2)..(2): Any L- or D-natural amino acid and any non-natural amino acid; see  specification as filed for detail ed description of substitutions, R-groups  and preferred embodiments
  MOD_RES (9)..(9): Any L- or D-natural amino acid and any non-natural amino acid; see  specification as filed for detail ed description of substitutions, R-groups  and preferred embodiments
  MOD_RES (11)..(11): Any L- or D-natural amino acid and any non-natural amino acid; see  specification as filed for detail ed description of substitutions, R-groups  and preferred embodiments
  MOD_RES (14)..(14): Any L- or D-natural amino acid and any non-natural amino acid; see  specification as filed for detail ed description of substitutions, R-groups  and preferred embodiments
  MOD_RES (15)..(18): Any L- or D-natural or non-natural amino acid, and this range may     encompass 1 or 4 residues; see specification as filed for detailed  description of substitutions, R-groups and preferred emb
  c-term may be amidated

SEQ ID NO: 669 - protein, 31 aa, Artificial Sequence; identical to SEQ ID NO: 290
  Description of Artificial Sequence: Synthetic peptide
  MOD_RES (3)..(3): Any L- or D-natural amino acid and any non-natural amino acid; see  specification as filed for detail ed description of substitutions, R-groups  and preferred embodiments
  MOD_RES (9)..(9): Any L- or D-natural amino acid and any non-natural amino acid; see  specification as filed for detail ed description of substitutions, R-groups  and preferred embodiments
  MOD_RES (11)..(11): Any L- or D-natural amino acid and any non-natural amino acid; see  specification as filed for detail ed description of substitutions, R-groups  and preferred embodiments
  MOD_RES (14)..(14): Any L- or D-natural amino acid and any non-natural amino acid; see  specification as filed for detail ed description of substitutions, R-groups  and preferred embodiments
  MOD_RES (15)..(18): Any L- or D-natural or non-natural amino acid, and this range may     encompass 1 or 4 residues; see specification as filed for detailed  description of substitutions, R-groups and preferred emb
  c-term may be amidated

SEQ ID NO: 670 - protein, 31 aa, Artificial Sequence; identical to SEQ ID NO: 291
  Description of Artificial Sequence: Synthetic peptide
  MOD_RES (4)..(4): Any L- or D-natural amino acid and any non-natural amino acid; see  specification as filed for detail ed description of substitutions, R-groups  and preferred embodiments
  MOD_RES (9)..(9): Any L- or D-natural amino acid and any non-natural amino acid; see  specification as filed for detail ed description of substitutions, R-groups  and preferred embodiments
  MOD_RES (11)..(11): Any L- or D-natural amino acid and any non-natural amino acid; see  specification as filed for detail ed description of substitutions, R-groups  and preferred embodiments
  MOD_RES (14)..(14): Any L- or D-natural amino acid and any non-natural amino acid; see  specification as filed for detail ed description of substitutions, R-groups  and preferred embodiments
  MOD_RES (15)..(18): Any L- or D-natural or non-natural amino acid, and this range may     encompass 1 or 4 residues; see specification as filed for detailed  description of substitutions, R-groups and preferred emb
  c-term may be amidated

SEQ ID NO: 671 - protein, 31 aa, Artificial Sequence; identical to SEQ ID NO: 292
  Description of Artificial Sequence: Synthetic peptide
  MOD_RES (5)..(5): Any L- or D-natural amino acid and any non-natural amino acid; see  specification as filed for detail ed description of substitutions, R-groups  and preferred embodiments
  MOD_RES (9)..(9): Any L- or D-natural amino acid and any non-natural amino acid; see  specification as filed for detail ed description of substitutions, R-groups  and preferred embodiments
  MOD_RES (11)..(11): Any L- or D-natural amino acid and any non-natural amino acid; see  specification as filed for detail ed description of substitutions, R-groups  and preferred embodiments
  MOD_RES (14)..(14): Any L- or D-natural amino acid and any non-natural amino acid; see  specification as filed for detail ed description of substitutions, R-groups  and preferred embodiments
  MOD_RES (15)..(18): Any L- or D-natural or non-natural amino acid, and this range may     encompass 1 or 4 residues; see specification as filed for detailed  description of substitutions, R-groups and preferred emb
  c-term may be amidated

SEQ ID NO: 672 - protein, 31 aa, Artificial Sequence; identical to SEQ ID NO: 293
  Description of Artificial Sequence: Synthetic peptide
  MOD_RES (6)..(6): Any L- or D-natural amino acid and any non-natural amino acid; see  specification as filed for detail ed description of substitutions, R-groups  and preferred embodiments
  MOD_RES (9)..(9): Any L- or D-natural amino acid and any non-natural amino acid; see  specification as filed for detail ed description of substitutions, R-groups  and preferred embodiments
  MOD_RES (11)..(11): Any L- or D-natural amino acid and any non-natural amino acid; see  specification as filed for detail ed description of substitutions, R-groups  and preferred embodiments
  MOD_RES (14)..(14): Any L- or D-natural amino acid and any non-natural amino acid; see  specification as filed for detail ed description of substitutions, R-groups  and preferred embodiments
  MOD_RES (15)..(18): Any L- or D-natural or non-natural amino acid, and this range may     encompass 1 or 4 residues; see specification as filed for detailed  description of substitutions, R-groups and preferred emb
  c-term may be amidated

SEQ ID NO: 673 - protein, 31 aa, Artificial Sequence; identical to SEQ ID NO: 294
  Description of Artificial Sequence: Synthetic peptide
  MOD_RES (7)..(7): Any L- or D-natural amino acid and any non-natural amino acid; see  specification as filed for detail ed description of substitutions, R-groups  and preferred embodiments
  MOD_RES (9)..(9): Any L- or D-natural amino acid and any non-natural amino acid; see  specification as filed for detail ed description of substitutions, R-groups  and preferred embodiments
  MOD_RES (11)..(11): Any L- or D-natural amino acid and any non-natural amino acid; see  specification as filed for detail ed description of substitutions, R-groups  and preferred embodiments
  MOD_RES (14)..(14): Any L- or D-natural amino acid and any non-natural amino acid; see  specification as filed for detail ed description of substitutions, R-groups  and preferred embodiments
  MOD_RES (15)..(18): Any L- or D-natural or non-natural amino acid, and this range may     encompass 1 or 4 residues; see specification as filed for detailed  description of substitutions, R-groups and preferred emb
  c-term may be amidated

SEQ ID NO: 674 - protein, 31 aa, Artificial Sequence; identical to SEQ ID NO: 295
  Description of Artificial Sequence: Synthetic peptide
  MOD_RES (8)..(9): Any L- or D-natural amino acid and any non-natural amino acid; see  specification as filed for detail ed description of substitutions, R-groups  and preferred embodiments
  MOD_RES (11)..(11): Any L- or D-natural amino acid and any non-natural amino acid; see  specification as filed for detail ed description of substitutions, R-groups  and preferred embodiments
  MOD_RES (14)..(14): Any L- or D-natural amino acid and any non-natural amino acid; see  specification as filed for detail ed description of substitutions, R-groups  and preferred embodiments
  MOD_RES (15)..(18): Any L- or D-natural or non-natural amino acid, and this range may     encompass 1 or 4 residues; see specification as filed for detailed  description of substitutions, R-groups and preferred emb
  c-term may be amidated

SEQ ID NO: 675 - protein, 34 aa, Artificial Sequence; identical to SEQ ID NO: 404
  Description of Artificial Sequence: Synthetic peptide
  MOD_RES (18)..(21): Any L- or D-natural or non-natural amino acid, and this range may     encompass 1 or 4 residues; see specification as filed for detailed  description of substitutions, R-groups and preferred emb
  c-term may be amidated

SEQ ID NO: 676 - protein, 34 aa, Artificial Sequence; identical to SEQ ID NO: 405
  Description of Artificial Sequence: Synthetic peptide
  MOD_RES (1)..(1): Any L- or D-natural amino acid and any non-natural amino acid; see  specification as filed for detail ed description of substitutions, R-groups  and preferred embodiments
  MOD_RES (9)..(9): Any L- or D-natural amino acid and any non-natural amino acid; see  specification as filed for detail ed description of substitutions, R-groups  and preferred embodiments
  MOD_RES (11)..(11): Any L- or D-natural amino acid and any non-natural amino acid; see  specification as filed for detail ed description of substitutions, R-groups  and preferred embodiments
  MOD_RES (18)..(21): Any L- or D-natural or non-natural amino acid, and this range may     encompass 1 or 4 residues; see specification as filed for detailed  description of substitutions, R-groups and preferred emb
  c-term may be amidated

SEQ ID NO: 677 - protein, 34 aa, Artificial Sequence; identical to SEQ ID NO: 406
  Description of Artificial Sequence: Synthetic peptide
  MOD_RES (2)..(2): Any L- or D-natural amino acid and any non-natural amino acid; see  specification as filed for detail ed description of substitutions, R-groups  and preferred embodiments
  MOD_RES (9)..(9): Any L- or D-natural amino acid and any non-natural amino acid; see  specification as filed for detail ed description of substitutions, R-groups  and preferred embodiments
  MOD_RES (11)..(11): Any L- or D-natural amino acid and any non-natural amino acid; see  specification as filed for detail ed description of substitutions, R-groups  and preferred embodiments
  MOD_RES (18)..(21): Any L- or D-natural or non-natural amino acid, and this range may     encompass 1 or 4 residues; see specification as filed for detailed  description of substitutions, R-groups and preferred emb
  c-term may be amidated

SEQ ID NO: 678 - protein, 34 aa, Artificial Sequence; identical to SEQ ID NO: 407
  Description of Artificial Sequence: Synthetic peptide
  MOD_RES (3)..(3): Any L- or D-natural amino acid and any non-natural amino acid; see  specification as filed for detail ed description of substitutions, R-groups  and preferred embodiments
  MOD_RES (9)..(9): Any L- or D-natural amino acid and any non-natural amino acid; see  specification as filed for detail ed description of substitutions, R-groups  and preferred embodiments
  MOD_RES (11)..(11): Any L- or D-natural amino acid and any non-natural amino acid; see  specification as filed for detail ed description of substitutions, R-groups  and preferred embodiments
  MOD_RES (18)..(21): Any L- or D-natural or non-natural amino acid, and this range may     encompass 1 or 4 residues; see specification as filed for detailed  description of substitutions, R-groups and preferred emb
  c-term may be amidated

SEQ ID NO: 679 - protein, 34 aa, Artificial Sequence; identical to SEQ ID NO: 408
  Description of Artificial Sequence: Synthetic peptide
  MOD_RES (4)..(4): Any L- or D-natural amino acid and any non-natural amino acid; see  specification as filed for detail ed description of substitutions, R-groups  and preferred embodiments
  MOD_RES (9)..(9): Any L- or D-natural amino acid and any non-natural amino acid; see  specification as filed for detail ed description of substitutions, R-groups  and preferred embodiments
  MOD_RES (11)..(11): Any L- or D-natural amino acid and any non-natural amino acid; see  specification as filed for detail ed description of substitutions, R-groups  and preferred embodiments
  MOD_RES (18)..(21): Any L- or D-natural or non-natural amino acid, and this range may     encompass 1 or 4 residues; see specification as filed for detailed  description of substitutions, R-groups and preferred emb
  c-term may be amidated

SEQ ID NO: 680 - protein, 34 aa, Artificial Sequence; identical to SEQ ID NO: 409
  Description of Artificial Sequence: Synthetic peptide
  MOD_RES (5)..(5): Any L- or D-natural amino acid and any non-natural amino acid; see  specification as filed for detail ed description of substitutions, R-groups  and preferred embodiments
  MOD_RES (9)..(9): Any L- or D-natural amino acid and any non-natural amino acid; see  specification as filed for detail ed description of substitutions, R-groups  and preferred embodiments
  MOD_RES (11)..(11): Any L- or D-natural amino acid and any non-natural amino acid; see  specification as filed for detail ed description of substitutions, R-groups  and preferred embodiments
  MOD_RES (18)..(21): Any L- or D-natural or non-natural amino acid, and this range may     encompass 1 or 4 residues; see specification as filed for detailed  description of substitutions, R-groups and preferred emb
  c-term may be amidated

SEQ ID NO: 681 - protein, 34 aa, Artificial Sequence; identical to SEQ ID NO: 410
  Description of Artificial Sequence: Synthetic peptide
  MOD_RES (6)..(6): Any L- or D-natural amino acid and any non-natural amino acid; see  specification as filed for detail ed description of substitutions, R-groups  and preferred embodiments
  MOD_RES (9)..(9): Any L- or D-natural amino acid and any non-natural amino acid; see  specification as filed for detail ed description of substitutions, R-groups  and preferred embodiments
  MOD_RES (11)..(11): Any L- or D-natural amino acid and any non-natural amino acid; see  specification as filed for detail ed description of substitutions, R-groups  and preferred embodiments
  MOD_RES (18)..(21): Any L- or D-natural or non-natural amino acid, and this range may     encompass 1 or 4 residues; see specification as filed for detailed  description of substitutions, R-groups and preferred emb
  c-term may be amidated

SEQ ID NO: 682 - protein, 34 aa, Artificial Sequence; identical to SEQ ID NO: 411
  Description of Artificial Sequence: Synthetic peptide
  MOD_RES (7)..(7): Any L- or D-natural amino acid and any non-natural amino acid; see  specification as filed for detail ed description of substitutions, R-groups  and preferred embodiments
  MOD_RES (9)..(9): Any L- or D-natural amino acid and any non-natural amino acid; see  specification as filed for detail ed description of substitutions, R-groups  and preferred embodiments
  MOD_RES (11)..(11): Any L- or D-natural amino acid and any non-natural amino acid; see  specification as filed for detail ed description of substitutions, R-groups  and preferred embodiments
  MOD_RES (18)..(21): Any L- or D-natural or non-natural amino acid, and this range may     encompass 1 or 4 residues; see specification as filed for detailed  description of substitutions, R-groups and preferred emb
  c-term may be amidated

SEQ ID NO: 683 - protein, 34 aa, Artificial Sequence; identical to SEQ ID NO: 412
  Description of Artificial Sequence: Synthetic peptide
  MOD_RES (8)..(9): Any L- or D-natural amino acid and any non-natural amino acid; see  specification as filed for detail ed description of substitutions, R-groups  and preferred embodiments
  MOD_RES (11)..(11): Any L- or D-natural amino acid and any non-natural amino acid; see  specification as filed for detail ed description of substitutions, R-groups  and preferred embodiments
  MOD_RES (18)..(21): Any L- or D-natural or non-natural amino acid, and this range may     encompass 1 or 4 residues; see specification as filed for detailed  description of substitutions, R-groups and preferred emb
  c-term may be amidated

SEQ ID NO: 684 - protein, 34 aa, Artificial Sequence; identical to SEQ ID NO: 413
  Description of Artificial Sequence: Synthetic peptide
  MOD_RES (12)..(12): Any L- or D-natural amino acid and any non-natural amino acid; see  specification as filed for detail ed description of substitutions, R-groups  and preferred embodiments
  MOD_RES (18)..(21): Any L- or D-natural or non-natural amino acid, and this range may     encompass 1 or 4 residues; see specification as filed for detailed  description of substitutions, R-groups and preferred emb
  c-term may be amidated

SEQ ID NO: 685 - protein, 34 aa, Artificial Sequence; identical to SEQ ID NO: 414
  Description of Artificial Sequence: Synthetic peptide
  MOD_RES (1)..(1): Any L- or D-natural amino acid and any non-natural amino acid; see  specification as filed for detail ed description of substitutions, R-groups  and preferred embodiments
  MOD_RES (9)..(9): Any L- or D-natural amino acid and any non-natural amino acid; see  specification as filed for detail ed description of substitutions, R-groups  and preferred embodiments
  MOD_RES (11)..(12): Any L- or D-natural amino acid and any non-natural amino acid; see  specification as filed for detail ed description of substitutions, R-groups  and preferred embodiments
  MOD_RES (18)..(21): Any L- or D-natural or non-natural amino acid, and this range may     encompass 1 or 4 residues; see specification as filed for detailed  description of substitutions, R-groups and preferred emb
  c-term may be amidated

SEQ ID NO: 686 - protein, 34 aa, Artificial Sequence; identical to SEQ ID NO: 415
  Description of Artificial Sequence: Synthetic peptide
  MOD_RES (2)..(2): Any L- or D-natural amino acid and any non-natural amino acid; see  specification as filed for detail ed description of substitutions, R-groups  and preferred embodiments
  MOD_RES (9)..(9): Any L- or D-natural amino acid and any non-natural amino acid; see  specification as filed for detail ed description of substitutions, R-groups  and preferred embodiments
  MOD_RES (11)..(12): Any L- or D-natural amino acid and any non-natural amino acid; see  specification as filed for detail ed description of substitutions, R-groups  and preferred embodiments
  MOD_RES (18)..(21): Any L- or D-natural or non-natural amino acid, and this range may     encompass 1 or 4 residues; see specification as filed for detailed  description of substitutions, R-groups and preferred emb
  c-term may be amidated

SEQ ID NO: 687 - protein, 34 aa, Artificial Sequence; identical to SEQ ID NO: 416
  Description of Artificial Sequence: Synthetic peptide
  MOD_RES (3)..(3): Any L- or D-natural amino acid and any non-natural amino acid; see  specification as filed for detail ed description of substitutions, R-groups  and preferred embodiments
  MOD_RES (9)..(9): Any L- or D-natural amino acid and any non-natural amino acid; see  specification as filed for detail ed description of substitutions, R-groups  and preferred embodiments
  MOD_RES (11)..(12): Any L- or D-natural amino acid and any non-natural amino acid; see  specification as filed for detail ed description of substitutions, R-groups  and preferred embodiments
  MOD_RES (18)..(21): Any L- or D-natural or non-natural amino acid, and this range may     encompass 1 or 4 residues; see specification as filed for detailed  description of substitutions, R-groups and preferred emb
  c-term may be amidated

SEQ ID NO: 688 - protein, 34 aa, Artificial Sequence; identical to SEQ ID NO: 417
  Description of Artificial Sequence: Synthetic peptide
  MOD_RES (4)..(4): Any L- or D-natural amino acid and any non-natural amino acid; see  specification as filed for detail ed description of substitutions, R-groups  and preferred embodiments
  MOD_RES (9)..(9): Any L- or D-natural amino acid and any non-natural amino acid; see  specification as filed for detail ed description of substitutions, R-groups  and preferred embodiments
  MOD_RES (11)..(12): Any L- or D-natural amino acid and any non-natural amino acid; see  specification as filed for detail ed description of substitutions, R-groups  and preferred embodiments
  MOD_RES (18)..(21): Any L- or D-natural or non-natural amino acid, and this range may     encompass 1 or 4 residues; see specification as filed for detailed  description of substitutions, R-groups and preferred emb
  c-term may be amidated

SEQ ID NO: 689 - protein, 34 aa, Artificial Sequence; identical to SEQ ID NO: 418
  Description of Artificial Sequence: Synthetic peptide
  MOD_RES (5)..(5): Any L- or D-natural amino acid and any non-natural amino acid; see  specification as filed for detail ed description of substitutions, R-groups  and preferred embodiments
  MOD_RES (9)..(9): Any L- or D-natural amino acid and any non-natural amino acid; see  specification as filed for detail ed description of substitutions, R-groups  and preferred embodiments
  MOD_RES (11)..(12): Any L- or D-natural amino acid and any non-natural amino acid; see  specification as filed for detail ed description of substitutions, R-groups  and preferred embodiments
  MOD_RES (18)..(21): Any L- or D-natural or non-natural amino acid, and this range may     encompass 1 or 4 residues; see specification as filed for detailed  description of substitutions, R-groups and preferred emb
  c-term may be amidated

SEQ ID NO: 690 - protein, 34 aa, Artificial Sequence; identical to SEQ ID NO: 419
  Description of Artificial Sequence: Synthetic peptide
  MOD_RES (6)..(6): Any L- or D-natural amino acid and any non-natural amino acid; see  specification as filed for detail ed description of substitutions, R-groups  and preferred embodiments
  MOD_RES (9)..(9): Any L- or D-natural amino acid and any non-natural amino acid; see  specification as filed for detail ed description of substitutions, R-groups  and preferred embodiments
  MOD_RES (11)..(12): Any L- or D-natural amino acid and any non-natural amino acid; see  specification as filed for detail ed description of substitutions, R-groups  and preferred embodiments
  MOD_RES (18)..(21): Any L- or D-natural or non-natural amino acid, and this range may     encompass 1 or 4 residues; see specification as filed for detailed  description of substitutions, R-groups and preferred emb
  c-term may be amidated

SEQ ID NO: 691 - protein, 34 aa, Artificial Sequence; identical to SEQ ID NO: 420
  Description of Artificial Sequence: Synthetic peptide
  MOD_RES (7)..(7): Any L- or D-natural amino acid and any non-natural amino acid; see  specification as filed for detail ed description of substitutions, R-groups  and preferred embodiments
  MOD_RES (9)..(9): Any L- or D-natural amino acid and any non-natural amino acid; see  specification as filed for detail ed description of substitutions, R-groups  and preferred embodiments
  MOD_RES (11)..(12): Any L- or D-natural amino acid and any non-natural amino acid; see  specification as filed for detail ed description of substitutions, R-groups  and preferred embodiments
  MOD_RES (18)..(21): Any L- or D-natural or non-natural amino acid, and this range may     encompass 1 or 4 residues; see specification as filed for detailed  description of substitutions, R-groups and preferred emb
  c-term may be amidated

SEQ ID NO: 692 - protein, 34 aa, Artificial Sequence; identical to SEQ ID NO: 421
  Description of Artificial Sequence: Synthetic peptide
  MOD_RES (8)..(9): Any L- or D-natural amino acid and any non-natural amino acid; see  specification as filed for detail ed description of substitutions, R-groups  and preferred embodiments
  MOD_RES (11)..(12): Any L- or D-natural amino acid and any non-natural amino acid; see  specification as filed for detail ed description of substitutions, R-groups  and preferred embodiments
  MOD_RES (18)..(21): Any L- or D-natural or non-natural amino acid, and this range may     encompass 1 or 4 residues; see specification as filed for detailed  description of substitutions, R-groups and preferred emb
  c-term may be amidated

SEQ ID NO: 693 - protein, 34 aa, Artificial Sequence; identical to SEQ ID NO: 422
  Description of Artificial Sequence: Synthetic peptide
  MOD_RES (13)..(13): Any L- or D-natural amino acid and any non-natural amino acid; see  specification as filed for detail ed description of substitutions, R-groups  and preferred embodiments
  MOD_RES (18)..(21): Any L- or D-natural or non-natural amino acid, and this range may     encompass 1 or 4 residues; see specification as filed for detailed  description of substitutions, R-groups and preferred emb
  c-term may be amidated

SEQ ID NO: 694 - protein, 34 aa, Artificial Sequence; identical to SEQ ID NO: 423
  Description of Artificial Sequence: Synthetic peptide
  MOD_RES (1)..(1): Any L- or D-natural amino acid and any non-natural amino acid; see  specification as filed for detail ed description of substitutions, R-groups  and preferred embodiments
  MOD_RES (9)..(9): Any L- or D-natural amino acid and any non-natural amino acid; see  specification as filed for detail ed description of substitutions, R-groups  and preferred embodiments
  MOD_RES (11)..(11): Any L- or D-natural amino acid and any non-natural amino acid; see  specification as filed for detail ed description of substitutions, R-groups  and preferred embodiments
  MOD_RES (13)..(13): Any L- or D-natural amino acid and any non-natural amino acid; see  specification as filed for detail ed description of substitutions, R-groups  and preferred embodiments
  MOD_RES (18)..(21): Any L- or D-natural or non-natural amino acid, and this range may     encompass 1 or 4 residues; see specification as filed for detailed  description of substitutions, R-groups and preferred emb
  c-term may be amidated

SEQ ID NO: 695 - protein, 34 aa, Artificial Sequence; identical to SEQ ID NO: 424
  Description of Artificial Sequence: Synthetic peptide
  MOD_RES (2)..(2): Any L- or D-natural amino acid and any non-natural amino acid; see  specification as filed for detail ed description of substitutions, R-groups  and preferred embodiments
  MOD_RES (9)..(9): Any L- or D-natural amino acid and any non-natural amino acid; see  specification as filed for detail ed description of substitutions, R-groups  and preferred embodiments
  MOD_RES (11)..(11): Any L- or D-natural amino acid and any non-natural amino acid; see  specification as filed for detail ed description of substitutions, R-groups  and preferred embodiments
  MOD_RES (13)..(13): Any L- or D-natural amino acid and any non-natural amino acid; see  specification as filed for detail ed description of substitutions, R-groups  and preferred embodiments
  MOD_RES (18)..(21): Any L- or D-natural or non-natural amino acid, and this range may     encompass 1 or 4 residues; see specification as filed for detailed  description of substitutions, R-groups and preferred emb
  c-term may be amidated

SEQ ID NO: 696 - protein, 34 aa, Artificial Sequence; identical to SEQ ID NO: 425
  Description of Artificial Sequence: Synthetic peptide
  MOD_RES (3)..(3): Any L- or D-natural amino acid and any non-natural amino acid; see  specification as filed for detail ed description of substitutions, R-groups  and preferred embodiments
  MOD_RES (9)..(9): Any L- or D-natural amino acid and any non-natural amino acid; see  specification as filed for detail ed description of substitutions, R-groups  and preferred embodiments
  MOD_RES (11)..(11): Any L- or D-natural amino acid and any non-natural amino acid; see  specification as filed for detail ed description of substitutions, R-groups  and preferred embodiments
  MOD_RES (13)..(13): Any L- or D-natural amino acid and any non-natural amino acid; see  specification as filed for detail ed description of substitutions, R-groups  and preferred embodiments
  MOD_RES (18)..(21): Any L- or D-natural or non-natural amino acid, and this range may     encompass 1 or 4 residues; see specification as filed for detailed  description of substitutions, R-groups and preferred emb
  c-term may be amidated

SEQ ID NO: 697 - protein, 34 aa, Artificial Sequence; identical to SEQ ID NO: 426
  Description of Artificial Sequence: Synthetic peptide
  MOD_RES (4)..(4): Any L- or D-natural amino acid and any non-natural amino acid; see  specification as filed for detail ed description of substitutions, R-groups  and preferred embodiments
  MOD_RES (9)..(9): Any L- or D-natural amino acid and any non-natural amino acid; see  specification as filed for detail ed description of substitutions, R-groups  and preferred embodiments
  MOD_RES (11)..(11): Any L- or D-natural amino acid and any non-natural amino acid; see  specification as filed for detail ed description of substitutions, R-groups  and preferred embodiments
  MOD_RES (13)..(13): Any L- or D-natural amino acid and any non-natural amino acid; see  specification as filed for detail ed description of substitutions, R-groups  and preferred embodiments
  MOD_RES (18)..(21): Any L- or D-natural or non-natural amino acid, and this range may     encompass 1 or 4 residues; see specification as filed for detailed  description of substitutions, R-groups and preferred emb
  c-term may be amidated

SEQ ID NO: 698 - protein, 34 aa, Artificial Sequence; identical to SEQ ID NO: 427
  Description of Artificial Sequence: Synthetic peptide
  MOD_RES (5)..(5): Any L- or D-natural amino acid and any non-natural amino acid; see  specification as filed for detail ed description of substitutions, R-groups  and preferred embodiments
  MOD_RES (9)..(9): Any L- or D-natural amino acid and any non-natural amino acid; see  specification as filed for detail ed description of substitutions, R-groups  and preferred embodiments
  MOD_RES (11)..(11): Any L- or D-natural amino acid and any non-natural amino acid; see  specification as filed for detail ed description of substitutions, R-groups  and preferred embodiments
  MOD_RES (13)..(13): Any L- or D-natural amino acid and any non-natural amino acid; see  specification as filed for detail ed description of substitutions, R-groups  and preferred embodiments
  MOD_RES (18)..(21): Any L- or D-natural or non-natural amino acid, and this range may     encompass 1 or 4 residues; see specification as filed for detailed  description of substitutions, R-groups and preferred emb
  c-term may be amidated

SEQ ID NO: 699 - protein, 34 aa, Artificial Sequence; identical to SEQ ID NO: 428
  Description of Artificial Sequence: Synthetic peptide
  MOD_RES (6)..(6): Any L- or D-natural amino acid and any non-natural amino acid; see  specification as filed for detail ed description of substitutions, R-groups  and preferred embodiments
  MOD_RES (9)..(9): Any L- or D-natural amino acid and any non-natural amino acid; see  specification as filed for detail ed description of substitutions, R-groups  and preferred embodiments
  MOD_RES (11)..(11): Any L- or D-natural amino acid and any non-natural amino acid; see  specification as filed for detail ed description of substitutions, R-groups  and preferred embodiments
  MOD_RES (13)..(13): Any L- or D-natural amino acid and any non-natural amino acid; see  specification as filed for detail ed description of substitutions, R-groups  and preferred embodiments
  MOD_RES (18)..(21): Any L- or D-natural or non-natural amino acid, and this range may     encompass 1 or 4 residues; see specification as filed for detailed  description of substitutions, R-groups and preferred emb
  c-term may be amidated

SEQ ID NO: 700 - protein, 34 aa, Artificial Sequence; identical to SEQ ID NO: 429
  Description of Artificial Sequence: Synthetic peptide
  MOD_RES (7)..(7): Any L- or D-natural amino acid and any non-natural amino acid; see  specification as filed for detail ed description of substitutions, R-groups  and preferred embodiments
  MOD_RES (9)..(9): Any L- or D-natural amino acid and any non-natural amino acid; see  specification as filed for detail ed description of substitutions, R-groups  and preferred embodiments
  MOD_RES (11)..(11): Any L- or D-natural amino acid and any non-natural amino acid; see  specification as filed for detail ed description of substitutions, R-groups  and preferred embodiments
  MOD_RES (13)..(13): Any L- or D-natural amino acid and any non-natural amino acid; see  specification as filed for detail ed description of substitutions, R-groups  and preferred embodiments
  MOD_RES (18)..(21): Any L- or D-natural or non-natural amino acid, and this range may     encompass 1 or 4 residues; see specification as filed for detailed  description of substitutions, R-groups and preferred emb
  c-term may be amidated

SEQ ID NO: 701 - protein, 34 aa, Artificial Sequence; identical to SEQ ID NO: 430
  Description of Artificial Sequence: Synthetic peptide
  MOD_RES (8)..(9): Any L- or D-natural amino acid and any non-natural amino acid; see  specification as filed for detail ed description of substitutions, R-groups  and preferred embodiments
  MOD_RES (11)..(11): Any L- or D-natural amino acid and any non-natural amino acid; see  specification as filed for detail ed description of substitutions, R-groups  and preferred embodiments
  MOD_RES (13)..(13): Any L- or D-natural amino acid and any non-natural amino acid; see  specification as filed for detail ed description of substitutions, R-groups  and preferred embodiments
  MOD_RES (18)..(21): Any L- or D-natural or non-natural amino acid, and this range may     encompass 1 or 4 residues; see specification as filed for detailed  description of substitutions, R-groups and preferred emb
  c-term may be amidated

SEQ ID NO: 702 - protein, 34 aa, Artificial Sequence; identical to SEQ ID NO: 431
  Description of Artificial Sequence: Synthetic peptide
  MOD_RES (14)..(14): Any L- or D-natural amino acid and any non-natural amino acid; see  specification as filed for detail ed description of substitutions, R-groups  and preferred embodiments
  MOD_RES (18)..(21): Any L- or D-natural or non-natural amino acid, and this range may     encompass 1 or 4 residues; see specification as filed for detailed  description of substitutions, R-groups and preferred emb
  c-term may be amidated

SEQ ID NO: 703 - protein, 34 aa, Artificial Sequence; identical to SEQ ID NO: 432
  Description of Artificial Sequence: Synthetic peptide
  MOD_RES (1)..(1): Any L- or D-natural amino acid and any non-natural amino acid; see  specification as filed for detail ed description of substitutions, R-groups  and preferred embodiments
  MOD_RES (9)..(9): Any L- or D-natural amino acid and any non-natural amino acid; see  specification as filed for detail ed description of substitutions, R-groups  and preferred embodiments
  MOD_RES (11)..(11): Any L- or D-natural amino acid and any non-natural amino acid; see  specification as filed for detail ed description of substitutions, R-groups  and preferred embodiments
  MOD_RES (14)..(14): Any L- or D-natural amino acid and any non-natural amino acid; see  specification as filed for detail ed description of substitutions, R-groups  and preferred embodiments
  MOD_RES (18)..(21): Any L- or D-natural or non-natural amino acid, and this range may     encompass 1 or 4 residues; see specification as filed for detailed  description of substitutions, R-groups and preferred emb
  c-term may be amidated

SEQ ID NO: 704 - protein, 34 aa, Artificial Sequence; identical to SEQ ID NO: 433
  Description of Artificial Sequence: Synthetic peptide
  MOD_RES (2)..(2): Any L- or D-natural amino acid and any non-natural amino acid; see  specification as filed for detail ed description of substitutions, R-groups  and preferred embodiments
  MOD_RES (9)..(9): Any L- or D-natural amino acid and any non-natural amino acid; see  specification as filed for detail ed description of substitutions, R-groups  and preferred embodiments
  MOD_RES (11)..(11): Any L- or D-natural amino acid and any non-natural amino acid; see  specification as filed for detail ed description of substitutions, R-groups  and preferred embodiments
  MOD_RES (14)..(14): Any L- or D-natural amino acid and any non-natural amino acid; see  specification as filed for detail ed description of substitutions, R-groups  and preferred embodiments
  MOD_RES (18)..(21): Any L- or D-natural or non-natural amino acid, and this range may     encompass 1 or 4 residues; see specification as filed for detailed  description of substitutions, R-groups and preferred emb
  c-term may be amidated

SEQ ID NO: 705 - protein, 34 aa, Artificial Sequence; identical to SEQ ID NO: 434
  Description of Artificial Sequence: Synthetic peptide
  MOD_RES (3)..(3): Any L- or D-natural amino acid and any non-natural amino acid; see  specification as filed for detail ed description of substitutions, R-groups  and preferred embodiments
  MOD_RES (9)..(9): Any L- or D-natural amino acid and any non-natural amino acid; see  specification as filed for detail ed description of substitutions, R-groups  and preferred embodiments
  MOD_RES (11)..(11): Any L- or D-natural amino acid and any non-natural amino acid; see  specification as filed for detail ed description of substitutions, R-groups  and preferred embodiments
  MOD_RES (14)..(14): Any L- or D-natural amino acid and any non-natural amino acid; see  specification as filed for detail ed description of substitutions, R-groups  and preferred embodiments
  MOD_RES (18)..(21): Any L- or D-natural or non-natural amino acid, and this range may     encompass 1 or 4 residues; see specification as filed for detailed  description of substitutions, R-groups and preferred emb
  c-term may be amidated

SEQ ID NO: 706 - protein, 34 aa, Artificial Sequence; identical to SEQ ID NO: 435
  Description of Artificial Sequence: Synthetic peptide
  MOD_RES (4)..(4): Any L- or D-natural amino acid and any non-natural amino acid; see  specification as filed for detail ed description of substitutions, R-groups  and preferred embodiments
  MOD_RES (9)..(9): Any L- or D-natural amino acid and any non-natural amino acid; see  specification as filed for detail ed description of substitutions, R-groups  and preferred embodiments
  MOD_RES (11)..(11): Any L- or D-natural amino acid and any non-natural amino acid; see  specification as filed for detail ed description of substitutions, R-groups  and preferred embodiments
  MOD_RES (14)..(14): Any L- or D-natural amino acid and any non-natural amino acid; see  specification as filed for detail ed description of substitutions, R-groups  and preferred embodiments
  MOD_RES (18)..(21): Any L- or D-natural or non-natural amino acid, and this range may     encompass 1 or 4 residues; see specification as filed for detailed  description of substitutions, R-groups and preferred emb
  c-term may be amidated

SEQ ID NO: 707 - protein, 34 aa, Artificial Sequence; identical to SEQ ID NO: 436
  Description of Artificial Sequence: Synthetic peptide
  MOD_RES (5)..(5): Any L- or D-natural amino acid and any non-natural amino acid; see  specification as filed for detail ed description of substitutions, R-groups  and preferred embodiments
  MOD_RES (9)..(9): Any L- or D-natural amino acid and any non-natural amino acid; see  specification as filed for detail ed description of substitutions, R-groups  and preferred embodiments
  MOD_RES (11)..(11): Any L- or D-natural amino acid and any non-natural amino acid; see  specification as filed for detail ed description of substitutions, R-groups  and preferred embodiments
  MOD_RES (14)..(14): Any L- or D-natural amino acid and any non-natural amino acid; see  specification as filed for detail ed description of substitutions, R-groups  and preferred embodiments
  MOD_RES (18)..(21): Any L- or D-natural or non-natural amino acid, and this range may     encompass 1 or 4 residues; see specification as filed for detailed  description of substitutions, R-groups and preferred emb
  c-term may be amidated

SEQ ID NO: 708 - protein, 34 aa, Artificial Sequence; identical to SEQ ID NO: 437
  Description of Artificial Sequence: Synthetic peptide
  MOD_RES (6)..(6): Any L- or D-natural amino acid and any non-natural amino acid; see  specification as filed for detail ed description of substitutions, R-groups  and preferred embodiments
  MOD_RES (9)..(9): Any L- or D-natural amino acid and any non-natural amino acid; see  specification as filed for detail ed description of substitutions, R-groups  and preferred embodiments
  MOD_RES (11)..(11): Any L- or D-natural amino acid and any non-natural amino acid; see  specification as filed for detail ed description of substitutions, R-groups  and preferred embodiments
  MOD_RES (14)..(14): Any L- or D-natural amino acid and any non-natural amino acid; see  specification as filed for detail ed description of substitutions, R-groups  and preferred embodiments
  MOD_RES (18)..(21): Any L- or D-natural or non-natural amino acid, and this range may     encompass 1 or 4 residues; see specification as filed for detailed  description of substitutions, R-groups and preferred emb
  c-term may be amidated

SEQ ID NO: 709 - protein, 34 aa, Artificial Sequence; identical to SEQ ID NO: 438
  Description of Artificial Sequence: Synthetic peptide
  MOD_RES (7)..(7): Any L- or D-natural amino acid and any non-natural amino acid; see  specification as filed for detail ed description of substitutions, R-groups  and preferred embodiments
  MOD_RES (9)..(9): Any L- or D-natural amino acid and any non-natural amino acid; see  specification as filed for detail ed description of substitutions, R-groups  and preferred embodiments
  MOD_RES (11)..(11): Any L- or D-natural amino acid and any non-natural amino acid; see  specification as filed for detail ed description of substitutions, R-groups  and preferred embodiments
  MOD_RES (14)..(14): Any L- or D-natural amino acid and any non-natural amino acid; see  specification as filed for detail ed description of substitutions, R-groups  and preferred embodiments
  MOD_RES (18)..(21): Any L- or D-natural or non-natural amino acid, and this range may     encompass 1 or 4 residues; see specification as filed for detailed  description of substitutions, R-groups and preferred emb
  c-term may be amidated

SEQ ID NO: 710 - protein, 34 aa, Artificial Sequence; identical to SEQ ID NO: 439
  Description of Artificial Sequence: Synthetic peptide
  MOD_RES (8)..(9): Any L- or D-natural amino acid and any non-natural amino acid; see  specification as filed for detail ed description of substitutions, R-groups  and preferred embodiments
  MOD_RES (11)..(11): Any L- or D-natural amino acid and any non-natural amino acid; see  specification as filed for detail ed description of substitutions, R-groups  and preferred embodiments
  MOD_RES (14)..(14): Any L- or D-natural amino acid and any non-natural amino acid; see  specification as filed for detail ed description of substitutions, R-groups  and preferred embodiments
  MOD_RES (18)..(21): Any L- or D-natural or non-natural amino acid, and this range may     encompass 1 or 4 residues; see specification as filed for detailed  description of substitutions, R-groups and preferred emb
  c-term may be amidated

SEQ ID NO: 711 - protein, 34 aa, Artificial Sequence; identical to SEQ ID NO: 440
  Description of Artificial Sequence: Synthetic peptide
  MOD_RES (16)..(16): Any L- or D-natural amino acid and any non-natural amino acid; see  specification as filed for detail ed description of substitutions, R-groups  and preferred embodiments
  MOD_RES (18)..(21): Any L- or D-natural or non-natural amino acid, and this range may     encompass 1 or 4 residues; see specification as filed for detailed  description of substitutions, R-groups and preferred emb
  c-term may be amidated

SEQ ID NO: 712 - protein, 34 aa, Artificial Sequence; identical to SEQ ID NO: 441
  Description of Artificial Sequence: Synthetic peptide
  MOD_RES (1)..(1): Any L- or D-natural amino acid and any non-natural amino acid; see  specification as filed for detail ed description of substitutions, R-groups  and preferred embodiments
  MOD_RES (9)..(9): Any L- or D-natural amino acid and any non-natural amino acid; see  specification as filed for detail ed description of substitutions, R-groups  and preferred embodiments
  MOD_RES (11)..(11): Any L- or D-natural amino acid and any non-natural amino acid; see  specification as filed for detail ed description of substitutions, R-groups  and preferred embodiments
  MOD_RES (16)..(16): Any L- or D-natural amino acid and any non-natural amino acid; see  specification as filed for detail ed description of substitutions, R-groups  and preferred embodiments
  MOD_RES (18)..(21): Any L- or D-natural or non-natural amino acid, and this range may     encompass 1 or 4 residues; see specification as filed for detailed  description of substitutions, R-groups and preferred emb
  c-term may be amidated

SEQ ID NO: 713 - protein, 34 aa, Artificial Sequence; identical to SEQ ID NO: 442
  Description of Artificial Sequence: Synthetic peptide
  MOD_RES (2)..(2): Any L- or D-natural amino acid and any non-natural amino acid; see  specification as filed for detail ed description of substitutions, R-groups  and preferred embodiments
  MOD_RES (9)..(9): Any L- or D-natural amino acid and any non-natural amino acid; see  specification as filed for detail ed description of substitutions, R-groups  and preferred embodiments
  MOD_RES (11)..(11): Any L- or D-natural amino acid and any non-natural amino acid; see  specification as filed for detail ed description of substitutions, R-groups  and preferred embodiments
  MOD_RES (16)..(16): Any L- or D-natural amino acid and any non-natural amino acid; see  specification as filed for detail ed description of substitutions, R-groups  and preferred embodiments
  MOD_RES (18)..(21): Any L- or D-natural or non-natural amino acid, and this range may     encompass 1 or 4 residues; see specification as filed for detailed  description of substitutions, R-groups and preferred emb
  c-term may be amidated

SEQ ID NO: 714 - protein, 34 aa, Artificial Sequence; identical to SEQ ID NO: 443
  Description of Artificial Sequence: Synthetic peptide
  MOD_RES (3)..(3): Any L- or D-natural amino acid and any non-natural amino acid; see  specification as filed for detail ed description of substitutions, R-groups  and preferred embodiments
  MOD_RES (9)..(9): Any L- or D-natural amino acid and any non-natural amino acid; see  specification as filed for detail ed description of substitutions, R-groups  and preferred embodiments
  MOD_RES (11)..(11): Any L- or D-natural amino acid and any non-natural amino acid; see  specification as filed for detail ed description of substitutions, R-groups  and preferred embodiments
  MOD_RES (16)..(16): Any L- or D-natural amino acid and any non-natural amino acid; see  specification as filed for detail ed description of substitutions, R-groups  and preferred embodiments
  MOD_RES (18)..(21): Any L- or D-natural or non-natural amino acid, and this range may     encompass 1 or 4 residues; see specification as filed for detailed  description of substitutions, R-groups and preferred emb
  c-term may be amidated

SEQ ID NO: 715 - protein, 34 aa, Artificial Sequence; identical to SEQ ID NO: 444
  Description of Artificial Sequence: Synthetic peptide
  MOD_RES (4)..(4): Any L- or D-natural amino acid and any non-natural amino acid; see  specification as filed for detail ed description of substitutions, R-groups  and preferred embodiments
  MOD_RES (9)..(9): Any L- or D-natural amino acid and any non-natural amino acid; see  specification as filed for detail ed description of substitutions, R-groups  and preferred embodiments
  MOD_RES (11)..(11): Any L- or D-natural amino acid and any non-natural amino acid; see  specification as filed for detail ed description of substitutions, R-groups  and preferred embodiments
  MOD_RES (16)..(16): Any L- or D-natural amino acid and any non-natural amino acid; see  specification as filed for detail ed description of substitutions, R-groups  and preferred embodiments
  MOD_RES (18)..(21): Any L- or D-natural or non-natural amino acid, and this range may     encompass 1 or 4 residues; see specification as filed for detailed  description of substitutions, R-groups and preferred emb
  c-term may be amidated

SEQ ID NO: 716 - protein, 34 aa, Artificial Sequence; identical to SEQ ID NO: 445
  Description of Artificial Sequence: Synthetic peptide
  MOD_RES (5)..(5): Any L- or D-natural amino acid and any non-natural amino acid; see  specification as filed for detail ed description of substitutions, R-groups  and preferred embodiments
  MOD_RES (9)..(9): Any L- or D-natural amino acid and any non-natural amino acid; see  specification as filed for detail ed description of substitutions, R-groups  and preferred embodiments
  MOD_RES (11)..(11): Any L- or D-natural amino acid and any non-natural amino acid; see  specification as filed for detail ed description of substitutions, R-groups  and preferred embodiments
  MOD_RES (16)..(16): Any L- or D-natural amino acid and any non-natural amino acid; see  specification as filed for detail ed description of substitutions, R-groups  and preferred embodiments
  MOD_RES (18)..(21): Any L- or D-natural or non-natural amino acid, and this range may     encompass 1 or 4 residues; see specification as filed for detailed  description of substitutions, R-groups and preferred emb
  c-term may be amidated

SEQ ID NO: 717 - protein, 34 aa, Artificial Sequence; identical to SEQ ID NO: 446
  Description of Artificial Sequence: Synthetic peptide
  MOD_RES (6)..(6): Any L- or D-natural amino acid and any non-natural amino acid; see  specification as filed for detail ed description of substitutions, R-groups  and preferred embodiments
  MOD_RES (9)..(9): Any L- or D-natural amino acid and any non-natural amino acid; see  specification as filed for detail ed description of substitutions, R-groups  and preferred embodiments
  MOD_RES (11)..(11): Any L- or D-natural amino acid and any non-natural amino acid; see  specification as filed for detail ed description of substitutions, R-groups  and preferred embodiments
  MOD_RES (16)..(16): Any L- or D-natural amino acid and any non-natural amino acid; see  specification as filed for detail ed description of substitutions, R-groups  and preferred embodiments
  MOD_RES (18)..(21): Any L- or D-natural or non-natural amino acid, and this range may     encompass 1 or 4 residues; see specification as filed for detailed  description of substitutions, R-groups and preferred emb
  c-term may be amidated

SEQ ID NO: 718 - protein, 34 aa, Artificial Sequence; identical to SEQ ID NO: 447
  Description of Artificial Sequence: Synthetic peptide
  MOD_RES (7)..(7): Any L- or D-natural amino acid and any non-natural amino acid; see  specification as filed for detail ed description of substitutions, R-groups  and preferred embodiments
  MOD_RES (9)..(9): Any L- or D-natural amino acid and any non-natural amino acid; see  specification as filed for detail ed description of substitutions, R-groups  and preferred embodiments
  MOD_RES (11)..(11): Any L- or D-natural amino acid and any non-natural amino acid; see  specification as filed for detail ed description of substitutions, R-groups  and preferred embodiments
  MOD_RES (16)..(16): Any L- or D-natural amino acid and any non-natural amino acid; see  specification as filed for detail ed description of substitutions, R-groups  and preferred embodiments
  MOD_RES (18)..(21): Any L- or D-natural or non-natural amino acid, and this range may     encompass 1 or 4 residues; see specification as filed for detailed  description of substitutions, R-groups and preferred emb
  c-term may be amidated

SEQ ID NO: 719 - protein, 34 aa, Artificial Sequence; identical to SEQ ID NO: 448
  Description of Artificial Sequence: Synthetic peptide
  MOD_RES (8)..(9): Any L- or D-natural amino acid and any non-natural amino acid; see  specification as filed for detail ed description of substitutions, R-groups  and preferred embodiments
  MOD_RES (11)..(11): Any L- or D-natural amino acid and any non-natural amino acid; see  specification as filed for detail ed description of substitutions, R-groups  and preferred embodiments
  MOD_RES (16)..(16): Any L- or D-natural amino acid and any non-natural amino acid; see  specification as filed for detail ed description of substitutions, R-groups  and preferred embodiments
  MOD_RES (18)..(21): Any L- or D-natural or non-natural amino acid, and this range may     encompass 1 or 4 residues; see specification as filed for detailed  description of substitutions, R-groups and preferred emb
  c-term may be amidated

SEQ ID NO: 720 - protein, 34 aa, Artificial Sequence; identical to SEQ ID NO: 449
  Description of Artificial Sequence: Synthetic peptide
  MOD_RES (17)..(17): Any L- or D-natural amino acid and any non-natural amino acid; see  specification as filed for detail ed description of substitutions, R-groups  and preferred embodiments
  MOD_RES (18)..(21): Any L- or D-natural or non-natural amino acid, and this range may     encompass 1 or 4 residues; see specification as filed for detailed  description of substitutions, R-groups and preferred emb
  c-term may be amidated

SEQ ID NO: 721 - protein, 34 aa, Artificial Sequence; identical to SEQ ID NO: 450
  Description of Artificial Sequence: Synthetic peptide
  MOD_RES (1)..(1): Any L- or D-natural amino acid and any non-natural amino acid; see  specification as filed for detail ed description of substitutions, R-groups  and preferred embodiments
  MOD_RES (9)..(9): Any L- or D-natural amino acid and any non-natural amino acid; see  specification as filed for detail ed description of substitutions, R-groups  and preferred embodiments
  MOD_RES (11)..(11): Any L- or D-natural amino acid and any non-natural amino acid; see  specification as filed for detail ed description of substitutions, R-groups  and preferred embodiments
  MOD_RES (17)..(17): Any L- or D-natural amino acid and any non-natural amino acid; see  specification as filed for detail ed description of substitutions, R-groups  and preferred embodiments
  MOD_RES (18)..(21): Any L- or D-natural or non-natural amino acid, and this range may     encompass 1 or 4 residues; see specification as filed for detailed  description of substitutions, R-groups and preferred emb
  c-term may be amidated

SEQ ID NO: 722 - protein, 34 aa, Artificial Sequence; identical to SEQ ID NO: 451
  Description of Artificial Sequence: Synthetic peptide
  MOD_RES (2)..(2): Any L- or D-natural amino acid and any non-natural amino acid; see  specification as filed for detail ed description of substitutions, R-groups  and preferred embodiments
  MOD_RES (9)..(9): Any L- or D-natural amino acid and any non-natural amino acid; see  specification as filed for detail ed description of substitutions, R-groups  and preferred embodiments
  MOD_RES (11)..(11): Any L- or D-natural amino acid and any non-natural amino acid; see  specification as filed for detail ed description of substitutions, R-groups  and preferred embodiments
  MOD_RES (17)..(17): Any L- or D-natural amino acid and any non-natural amino acid; see  specification as filed for detail ed description of substitutions, R-groups  and preferred embodiments
  MOD_RES (18)..(21): Any L- or D-natural or non-natural amino acid, and this range may     encompass 1 or 4 residues; see specification as filed for detailed  description of substitutions, R-groups and preferred emb
  c-term may be amidated

SEQ ID NO: 723 - protein, 34 aa, Artificial Sequence; identical to SEQ ID NO: 452
  Description of Artificial Sequence: Synthetic peptide
  MOD_RES (3)..(3): Any L- or D-natural amino acid and any non-natural amino acid; see  specification as filed for detail ed description of substitutions, R-groups  and preferred embodiments
  MOD_RES (9)..(9): Any L- or D-natural amino acid and any non-natural amino acid; see  specification as filed for detail ed description of substitutions, R-groups  and preferred embodiments
  MOD_RES (11)..(11): Any L- or D-natural amino acid and any non-natural amino acid; see  specification as filed for detail ed description of substitutions, R-groups  and preferred embodiments
  MOD_RES (17)..(17): Any L- or D-natural amino acid and any non-natural amino acid; see  specification as filed for detail ed description of substitutions, R-groups  and preferred embodiments
  MOD_RES (18)..(21): Any L- or D-natural or non-natural amino acid, and this range may     encompass 1 or 4 residues; see specification as filed for detailed  description of substitutions, R-groups and preferred emb
  c-term may be amidated

SEQ ID NO: 724 - protein, 34 aa, Artificial Sequence; identical to SEQ ID NO: 453
  Description of Artificial Sequence: Synthetic peptide
  MOD_RES (4)..(4): Any L- or D-natural amino acid and any non-natural amino acid; see  specification as filed for detail ed description of substitutions, R-groups  and preferred embodiments
  MOD_RES (9)..(9): Any L- or D-natural amino acid and any non-natural amino acid; see  specification as filed for detail ed description of substitutions, R-groups  and preferred embodiments
  MOD_RES (11)..(11): Any L- or D-natural amino acid and any non-natural amino acid; see  specification as filed for detail ed description of substitutions, R-groups  and preferred embodiments
  MOD_RES (17)..(17): Any L- or D-natural amino acid and any non-natural amino acid; see  specification as filed for detail ed description of substitutions, R-groups  and preferred embodiments
  MOD_RES (18)..(21): Any L- or D-natural or non-natural amino acid, and this range may     encompass 1 or 4 residues; see specification as filed for detailed  description of substitutions, R-groups and preferred emb
  c-term may be amidated

SEQ ID NO: 725 - protein, 34 aa, Artificial Sequence; identical to SEQ ID NO: 454
  Description of Artificial Sequence: Synthetic peptide
  MOD_RES (5)..(5): Any L- or D-natural amino acid and any non-natural amino acid; see  specification as filed for detail ed description of substitutions, R-groups  and preferred embodiments
  MOD_RES (9)..(9): Any L- or D-natural amino acid and any non-natural amino acid; see  specification as filed for detail ed description of substitutions, R-groups  and preferred embodiments
  MOD_RES (11)..(11): Any L- or D-natural amino acid and any non-natural amino acid; see  specification as filed for detail ed description of substitutions, R-groups  and preferred embodiments
  MOD_RES (17)..(17): Any L- or D-natural amino acid and any non-natural amino acid; see  specification as filed for detail ed description of substitutions, R-groups  and preferred embodiments
  MOD_RES (18)..(21): Any L- or D-natural or non-natural amino acid, and this range may     encompass 1 or 4 residues; see specification as filed for detailed  description of substitutions, R-groups and preferred emb
  c-term may be amidated

SEQ ID NO: 726 - protein, 34 aa, Artificial Sequence; identical to SEQ ID NO: 455
  Description of Artificial Sequence: Synthetic peptide
  MOD_RES (6)..(6): Any L- or D-natural amino acid and any non-natural amino acid; see  specification as filed for detail ed description of substitutions, R-groups  and preferred embodiments
  MOD_RES (9)..(9): Any L- or D-natural amino acid and any non-natural amino acid; see  specification as filed for detail ed description of substitutions, R-groups  and preferred embodiments
  MOD_RES (11)..(11): Any L- or D-natural amino acid and any non-natural amino acid; see  specification as filed for detail ed description of substitutions, R-groups  and preferred embodiments
  MOD_RES (17)..(17): Any L- or D-natural amino acid and any non-natural amino acid; see  specification as filed for detail ed description of substitutions, R-groups  and preferred embodiments
  MOD_RES (18)..(21): Any L- or D-natural or non-natural amino acid, and this range may     encompass 1 or 4 residues; see specification as filed for detailed  description of substitutions, R-groups and preferred emb
  c-term may be amidated

SEQ ID NO: 727 - protein, 34 aa, Artificial Sequence; identical to SEQ ID NO: 456
  Description of Artificial Sequence: Synthetic peptide
  MOD_RES (7)..(7): Any L- or D-natural amino acid and any non-natural amino acid; see  specification as filed for detail ed description of substitutions, R-groups  and preferred embodiments
  MOD_RES (9)..(9): Any L- or D-natural amino acid and any non-natural amino acid; see  specification as filed for detail ed description of substitutions, R-groups  and preferred embodiments
  MOD_RES (11)..(11): Any L- or D-natural amino acid and any non-natural amino acid; see  specification as filed for detail ed description of substitutions, R-groups  and preferred embodiments
  MOD_RES (17)..(17): Any L- or D-natural amino acid and any non-natural amino acid; see  specification as filed for detail ed description of substitutions, R-groups  and preferred embodiments
  MOD_RES (18)..(21): Any L- or D-natural or non-natural amino acid, and this range may     encompass 1 or 4 residues; see specification as filed for detailed  description of substitutions, R-groups and preferred emb
  c-term may be amidated

SEQ ID NO: 728 - protein, 34 aa, Artificial Sequence; identical to SEQ ID NO: 457
  Description of Artificial Sequence: Synthetic peptide
  MOD_RES (8)..(9): Any L- or D-natural amino acid and any non-natural amino acid; see  specification as filed for detail ed description of substitutions, R-groups  and preferred embodiments
  MOD_RES (11)..(11): Any L- or D-natural amino acid and any non-natural amino acid; see  specification as filed for detail ed description of substitutions, R-groups  and preferred embodiments
  MOD_RES (17)..(17): Any L- or D-natural amino acid and any non-natural amino acid; see  specification as filed for detail ed description of substitutions, R-groups  and preferred embodiments
  MOD_RES (18)..(21): Any L- or D-natural or non-natural amino acid, and this range may     encompass 1 or 4 residues; see specification as filed for detailed  description of substitutions, R-groups and preferred emb
  c-term may be amidated

SEQ ID NO: 729 - protein, 9 aa, Artificial Sequence
  Description of Artificial Sequence: Synthetic peptide
  c-term may be amidated
SLAADTPTA

SEQ ID NO: 730 - protein, 21 aa, Artificial Sequence
  Description of Artificial Sequence: Synthetic peptide
  c-term may be amidated
AFSYTSRQIPQNADYFETSSQ

SEQ ID NO: 731 - protein, 15 aa, Artificial Sequence [sequence omitted]

SEQ ID NO: 732 - protein, 30 aa, Artificial Sequence
  Description of Artificial Sequence: Synthetic peptide
  c-term may be amidated
SLAADTPTCCFSYTSRQIPQNADYFETSSQ

SEQ ID NO: 733 - protein, 30 aa, Artificial Sequence
  Description of Artificial Sequence: Synthetic peptide
  MOD_RES (1)..(1): Any L- or D-natural amino acid and any non-natural amino acid; see  specification as filed for detail ed description of substitutions, R-groups  and preferred embodiments
  MOD_RES (9)..(10): Any L- or D-natural amino acid and any non-natural amino acid; see  specification as filed for detail ed description of substitutions, R-groups  and preferred embodiments
  c-term may be amidated
XLAADTPTXXFSYTSRQIPQNADYFETSSQ

SEQ ID NO: 734 - protein, 30 aa, Artificial Sequence
  Description of Artificial Sequence: Synthetic peptide
  MOD_RES (2)..(2): Any L- or D-natural amino acid and any non-natural amino acid; see  specification as filed for detail ed description of substitutions, R-groups  and preferred embodiments
  MOD_RES (9)..(10): Any L- or D-natural amino acid and any non-natural amino acid; see  specification as filed for detail ed description of substitutions, R-groups  and preferred embodiments
  c-term may be amidated
SXAADTPTXXFSYTSRQIPQNADYFETSSQ

SEQ ID NO: 735 - protein, 30 aa, Artificial Sequence
  Description of Artificial Sequence: Synthetic peptide
  MOD_RES (3)..(3): Any L- or D-natural amino acid and any non-natural amino acid; see  specification as filed for detail ed description of substitutions, R-groups  and preferred embodiments
  MOD_RES (9)..(10): Any L- or D-natural amino acid and any non-natural amino acid; see  specification as filed for detail ed description of substitutions, R-groups  and preferred embodiments
  c-term may be amidated
SLXADTPTXXFSYTSRQIPQNADYFETSSQ

SEQ ID NO: 736 - protein, 30 aa, Artificial Sequence
  Description of Artificial Sequence: Synthetic peptide
  MOD_RES (4)..(4): Any L- or D-natural amino acid and any non-natural amino acid; see  specification as filed for detail ed description of substitutions, R-groups  and preferred embodiments
  MOD_RES (9)..(10): Any L- or D-natural amino acid and any non-natural amino acid; see  specification as filed for detail ed description of substitutions, R-groups  and preferred embodiments
  c-term may be amidated
SLAXDTPTXXFSYTSRQIPQNADYFETSSQ

SEQ ID NO: 737 - protein, 30 aa, Artificial Sequence
  Description of Artificial Sequence: Synthetic peptide
  MOD_RES (5)..(5): Any L- or D-natural amino acid and any non-natural amino acid; see  specification as filed for detail ed description of substitutions, R-groups  and preferred embodiments
  MOD_RES (9)..(10): Any L- or D-natural amino acid and any non-natural amino acid; see  specification as filed for detail ed description of substitutions, R-groups  and preferred embodiments
  c-term may be amidated
SLAAXTPTXXFSYTSRQIPQNADYFETSSQ

SEQ ID NO: 738 - protein, 30 aa, Artificial Sequence
  Description of Artificial Sequence: Synthetic peptide
  MOD_RES (6)..(6): Any L- or D-natural amino acid and any non-natural amino acid; see  specification as filed for detail ed description of substitutions, R-groups  and preferred embodiments
  MOD_RES (9)..(10): Any L- or D-natural amino acid and any non-natural amino acid; see  specification as filed for detail ed description of substitutions, R-groups  and preferred embodiments
  c-term may be amidated
SLAADXPTXXFSYTSRQIPQNADYFETSSQ

SEQ ID NO: 739 - protein, 30 aa, Artificial Sequence
  Description of Artificial Sequence: Synthetic peptide
  MOD_RES (7)..(7): Any L- or D-natural amino acid and any non-natural amino acid; see  specification as filed for detail ed description of substitutions, R-groups  and preferred embodiments
  MOD_RES (9)..(10): Any L- or D-natural amino acid and any non-natural amino acid; see  specification as filed for detail ed description of substitutions, R-groups  and preferred embodiments
  c-term may be amidated
SLAADTXTXXFSYTSRQIPQNADYFETSSQ

SEQ ID NO: 740 - protein, 30 aa, Artificial Sequence
  Description of Artificial Sequence: Synthetic peptide
  MOD_RES (8)..(10): Any L- or D-natural amino acid and any non-natural amino acid; see  specification as filed for detail ed description of substitutions, R-groups  and preferred embodiments
  c-term may be amidated
SLAADTPXXXFSYTSRQIPQNADYFETSSQ

SEQ ID NO: 741 - protein, 18 aa, Artificial Sequence
  Description of Artificial Sequence: Synthetic peptide
  c-term may be amidated
ADPSEEWVQYVDDLELSA

SEQ ID NO: 742 - protein, 32 aa, Artificial Sequence
  Description of Artificial Sequence: Synthetic peptide
  MOD_RES (15)..(18): Any L- or D-natural or non-natural amino acid, and this range may     encompass 1 or 4 residues; see specification as filed for detailed  description of substitutions, R-groups and preferred emb
  c-term may be amidated
SLAADTPTCCFSYTXXXXEEWVQYVDDLELSA

SEQ ID NO: 743 - protein, 32 aa, Artificial Sequence
  Description of Artificial Sequence: Synthetic peptide
  MOD_RES (9)..(10): Any L- or D-natural amino acid and any non-natural amino acid; see  specification as filed for detail ed description of substitutions, R-groups  and preferred embodiments
  MOD_RES (15)..(18): Any L- or D-natural or non-natural amino acid, and this range may     encompass 1 or 4 residues; see specification as filed for detailed  description of substitutions, R-groups and preferred emb
  c-term may be amidated
SLAADTPTXXFSYTXXXXEEWVQYVDDLELSA

SEQ ID NO: 744 - protein, 32 aa, Artificial Sequence
  Description of Artificial Sequence: Synthetic peptide
  MOD_RES (1)..(1): Any L- or D-natural amino acid and any non-natural amino acid; see  specification as filed for detail ed description of substitutions, R-groups  and preferred embodiments
  MOD_RES (9)..(10): Any L- or D-natural amino acid and any non-natural amino acid; see  specification as filed for detail ed description of substitutions, R-groups  and preferred embodiments
  MOD_RES (15)..(18): Any L- or D-natural or non-natural amino acid, and this range may     encompass 1 or 4 residues; see specification as filed for detailed  description of substitutions, R-groups and preferred emb
  c-term may be amidated
XLAADTPTXXFSYTXXXXEEWVQYVDDLELSA

SEQ ID NO: 745 - protein, 32 aa, Artificial Sequence
  Description of Artificial Sequence: Synthetic peptide
  MOD_RES (2)..(2): Any L- or D-natural amino acid and any non-natural amino acid; see  specification as filed for detail ed description of substitutions, R-groups  and preferred embodiments
  MOD_RES (9)..(10): Any L- or D-natural amino acid and any non-natural amino acid; see  specification as filed for detail ed description of substitutions, R-groups  and preferred embodiments
  MOD_RES (15)..(18): Any L- or D-natural or non-natural amino acid, and this range may     encompass 1 or 4 residues; see specification as filed for detailed  description of substitutions, R-groups and preferred emb
  c-term may be amidated
SXAADTPTXXFSYTXXXXEEWVQYVDDLELSA

SEQ ID NO: 746 - protein, 32 aa, Artificial Sequence
  Description of Artificial Sequence: Synthetic peptide
  MOD_RES (3)..(3): Any L- or D-natural amino acid and any non-natural amino acid; see  specification as filed for detail ed description of substitutions, R-groups  and preferred embodiments
  MOD_RES (9)..(10): Any L- or D-natural amino acid and any non-natural amino acid; see  specification as filed for detail ed description of substitutions, R-groups  and preferred embodiments
  MOD_RES (15)..(18): Any L- or D-natural or non-natural amino acid, and this range may     encompass 1 or 4 residues; see specification as filed for detailed  description of substitutions, R-groups and preferred emb
  c-term may be amidated
SLXADTPTXXFSYTXXXXEEWVQYVDDLELSA

SEQ ID NO: 747 - protein, 32 aa, Artificial Sequence
  Description of Artificial Sequence: Synthetic peptide
  MOD_RES (4)..(4): Any L- or D-natural amino acid and any non-natural amino acid; see  specification as filed for detail ed description of substitutions, R-groups  and preferred embodiments
  MOD_RES (9)..(10): Any L- or D-natural amino acid and any non-natural amino acid; see  specification as filed for detail ed description of substitutions, R-groups  and preferred embodiments
  MOD_RES (15)..(18): Any L- or D-natural or non-natural amino acid, and this range may     encompass 1 or 4 residues; see specification as filed for detailed  description of substitutions, R-groups and preferred emb
  c-term may be amidated
SLAXDTPTXXFSYTXXXXEEWVQYVDDLELSA

SEQ ID NO: 748 - protein, 32 aa, Artificial Sequence
  Description of Artificial Sequence: Synthetic peptide
  MOD_RES (5)..(5): Any L- or D-natural amino acid and any non-natural amino acid; see  specification as filed for detail ed description of substitutions, R-groups  and preferred embodiments
  MOD_RES (9)..(10): Any L- or D-natural amino acid and any non-natural amino acid; see  specification as filed for detail ed description of substitutions, R-groups  and preferred embodiments
  MOD_RES (15)..(18): Any L- or D-natural or non-natural amino acid, and this range may     encompass 1 or 4 residues; see specification as filed for detailed  description of substitutions, R-groups and preferred emb
  c-term may be amidated
SLAAXTPTXXFSYTXXXXEEWVQYVDDLELSA

SEQ ID NO: 749 - protein, 32 aa, Artificial Sequence
  Description of Artificial Sequence: Synthetic peptide
  MOD_RES (6)..(6): Any L- or D-natural amino acid and any non-natural amino acid; see  specification as filed for detail ed description of substitutions, R-groups  and preferred embodiments
  MOD_RES (9)..(10): Any L- or D-natural amino acid and any non-natural amino acid; see  specification as filed for detail ed description of substitutions, R-groups  and preferred embodiments
  MOD_RES (15)..(18): Any L- or D-natural or non-natural amino acid, and this range may     encompass 1 or 4 residues; see specification as filed for detailed  description of substitutions, R-groups and preferred emb
  c-term may be amidated
SLAADXPTXXFSYTXXXXEEWVQYVDDLELSA

SEQ ID NO: 750 - protein, 32 aa, Artificial Sequence
  Description of Artificial Sequence: Synthetic peptide
  MOD_RES (7)..(7): Any L- or D-natural amino acid and any non-natural amino acid; see  specification as filed for detail ed description of substitutions, R-groups  and preferred embodiments
  MOD_RES (9)..(10): Any L- or D-natural amino acid and any non-natural amino acid; see  specification as filed for detail ed description of substitutions, R-groups  and preferred embodiments
  MOD_RES (15)..(18): Any L- or D-natural or non-natural amino acid, and this range may     encompass 1 or 4 residues; see specification as filed for detailed  description of substitutions, R-groups and preferred emb
  c-term may be amidated
SLAADTXTXXFSYTXXXXEEWVQYVDDLELSA

SEQ ID NO: 751 - protein, 32 aa, Artificial Sequence
  Description of Artificial Sequence: Synthetic peptide
  MOD_RES (8)..(10): Any L- or D-natural amino acid and any non-natural amino acid; see  specification as filed for detail ed description of substitutions, R-groups  and preferred embodiments
  MOD_RES (15)..(18): Any L- or D-natural or non-natural amino acid, and this range may     encompass 1 or 4 residues; see specification as filed for detailed  description of substitutions, R-groups and preferred emb
  c-term may be amidated
SLAADTPXXXFSYTXXXXEEWVQYVDDLELSA

SEQ ID NO: 752 - protein, 32 aa, Artificial Sequence
  Description of Artificial Sequence: Synthetic peptide
  MOD_RES (9)..(11): Any L- or D-natural amino acid and any non-natural amino acid; see  specification as filed for detail ed description of substitutions, R-groups  and preferred embodiments
  MOD_RES (15)..(18): Any L- or D-natural or non-natural amino acid, and this range may     encompass 1 or 4 residues; see specification as filed for detailed  description of substitutions, R-groups and preferred emb
  c-term may be amidated
SLAADTPTXXXSYTXXXXEEWVQYVDDLELSA

SEQ ID NO: 753 - protein, 32 aa, Artificial Sequence
  Description of Artificial Sequence: Synthetic peptide
  MOD_RES (1)..(1): Any L- or D-natural amino acid and any non-natural amino acid; see  specification as filed for detail ed description of substitutions, R-groups  and preferred embodiments
  MOD_RES (9)..(11): Any L- or D-natural amino acid and any non-natural amino acid; see  specification as filed for detail ed description of substitutions, R-groups  and preferred embodiments
  MOD_RES (15)..(18): Any L- or D-natural or non-natural amino acid, and this range may     encompass 1 or 4 residues; see specification as filed for detailed  description of substitutions, R-groups and preferred emb
  c-term may be amidated
XLAADTPTXXXSYTXXXXEEWVQYVDDLELSA

SEQ ID NO: 754 - protein, 32 aa, Artificial Sequence
  Description of Artificial Sequence: Synthetic peptide
  MOD_RES (2)..(2): Any L- or D-natural amino acid and any non-natural amino acid; see  specification as filed for detail ed description of substitutions, R-groups  and preferred embodiments
  MOD_RES (9)..(11): Any L- or D-natural amino acid and any non-natural amino acid; see  specification as filed for detail ed description of substitutions, R-groups  and preferred embodiments
  MOD_RES (15)..(18): Any L- or D-natural or non-natural amino acid, and this range may     encompass 1 or 4 residues; see specification as filed for detailed  description of substitutions, R-groups and preferred emb
  c-term may be amidated
SXAADTPTXXXSYTXXXXEEWVQYVDDLELSA

SEQ ID NO: 755 - protein, 32 aa, Artificial Sequence
  Description of Artificial Sequence: Synthetic peptide
  MOD_RES (3)..(3): Any L- or D-natural amino acid and any non-natural amino acid; see  specification as filed for detail ed description of substitutions, R-groups  and preferred embodiments
  MOD_RES (9)..(11): Any L- or D-natural amino acid and any non-natural amino acid; see  specification as filed for detail ed description of substitutions, R-groups  and preferred embodiments
  MOD_RES (15)..(18): Any L- or D-natural or non-natural amino acid, and this range may     encompass 1 or 4 residues; see specification as filed for detailed  description of substitutions, R-groups and preferred emb
  c-term may be amidated
SLXADTPTXXXSYTXXXXEEWVQYVDDLELSA

SEQ ID NO: 756 - protein, 32 aa, Artificial Sequence
  Description of Artificial Sequence: Synthetic peptide
  MOD_RES (4)..(4): Any L- or D-natural amino acid and any non-natural amino acid; see  specification as filed for detail ed description of substitutions, R-groups  and preferred embodiments
  MOD_RES (9)..(11): Any L- or D-natural amino acid and any non-natural amino acid; see  specification as filed for detail ed description of substitutions, R-groups  and preferred embodiments
  MOD_RES (15)..(18): Any L- or D-natural or non-natural amino acid, and this range may     encompass 1 or 4 residues; see specification as filed for detailed  description of substitutions, R-groups and preferred emb
  c-term may be amidated
SLAXDTPTXXXSYTXXXXEEWVQYVDDLELSA

SEQ ID NO: 757 - protein, 32 aa, Artificial Sequence
  Description of Artificial Sequence: Synthetic peptide
  MOD_RES (5)..(5): Any L- or D-natural amino acid and any non-natural amino acid; see  specification as filed for detail ed description of substitutions, R-groups  and preferred embodiments
  MOD_RES (9)..(11): Any L- or D-natural amino acid and any non-natural amino acid; see  specification as filed for detail ed description of substitutions, R-groups  and preferred embodiments
  MOD_RES (15)..(18): Any L- or D-natural or non-natural amino acid, and this range may     encompass 1 or 4 residues; see specification as filed for detailed  description of substitutions, R-groups and preferred emb
  c-term may be amidated
SLAAXTPTXXXSYTXXXXEEWVQYVDDLELSA

SEQ ID NO: 758 - protein, 32 aa, Artificial Sequence
  Description of Artificial Sequence: Synthetic peptide
  MOD_RES (6)..(6): Any L- or D-natural amino acid and any non-natural amino acid; see  specification as filed for detail ed description of substitutions, R-groups  and preferred embodiments
  MOD_RES (9)..(11): Any L- or D-natural amino acid and any non-natural amino acid; see  specification as filed for detail ed description of substitutions, R-groups  and preferred embodiments
  MOD_RES (15)..(18): Any L- or D-natural or non-natural amino acid, and this range may     encompass 1 or 4 residues; see specification as filed for detailed  description of substitutions, R-groups and preferred emb
  c-term may be amidated
SLAADXPTXXXSYTXXXXEEWVQYVDDLELSA

SEQ ID NO: 759 - protein, 32 aa, Artificial Sequence
  Description of Artificial Sequence: Synthetic peptide
  MOD_RES (7)..(7): Any L- or D-natural amino acid and any non-natural amino acid; see  specification as filed for detail ed description of substitutions, R-groups  and preferred embodiments
  MOD_RES (9)..(11): Any L- or D-natural amino acid and any non-natural amino acid; see  specification as filed for detail ed description of substitutions, R-groups  and preferred embodiments
  MOD_RES (15)..(18): Any L- or D-natural or non-natural amino acid, and this range may     encompass 1 or 4 residues; see specification as filed for detailed  description of substitutions, R-groups and preferred emb
  c-term may be amidated
SLAADTXTXXXSYTXXXXEEWVQYVDDLELSA

SEQ ID NO: 760 - protein, 32 aa, Artificial Sequence
  Description of Artificial Sequence: Synthetic peptide
  MOD_RES (8)..(11): Any L- or D-natural amino acid and any non-natural amino acid; see  specification as filed for detail ed description of substitutions, R-groups  and preferred embodiments
  MOD_RES (15)..(18): Any L- or D-natural or non-natural amino acid, and this range may     encompass 1 or 4 residues; see specification as filed for detailed  description of substitutions, R-groups and preferred emb
  c-term may be amidated
SLAADTPXXXXSYTXXXXEEWVQYVDDLELSA

SEQ ID NO: 761 - protein, 32 aa, Artificial Sequence
  Description of Artificial Sequence: Synthetic peptide
  MOD_RES (9)..(10): Any L- or D-natural amino acid and any non-natural amino acid; see  specification as filed for detail ed description of substitutions, R-groups  and preferred embodiments
  MOD_RES (12)..(12): Any L- or D-natural amino acid and any non-natural amino acid; see  specification as filed for detail ed description of substitutions, R-groups  and preferred embodiments
  MOD_RES (15)..(18): Any L- or D-natural or non-natural amino acid, and this range may     encompass 1 or 4 residues; see specification as filed for detailed  description of substitutions, R-groups and preferred emb
  c-term may be amidated
SLAADTPTXXFXYTXXXXEEWVQYVDDLELSA

SEQ ID NO: 762 - protein, 32 aa, Artificial Sequence
  Description of Artificial Sequence: Synthetic peptide
  MOD_RES (1)..(1): Any L- or D-natural amino acid and any non-natural amino acid; see  specification as filed for detail ed description of substitutions, R-groups  and preferred embodiments
  MOD_RES (9)..(10): Any L- or D-natural amino acid and any non-natural amino acid; see  specification as filed for detail ed description of substitutions, R-groups  and preferred embodiments
  MOD_RES (12)..(12): Any L- or D-natural amino acid and any non-natural amino acid; see  specification as filed for detail ed description of substitutions, R-groups  and preferred embodiments
  MOD_RES (15)..(18): Any L- or D-natural or non-natural amino acid, and this range may     encompass 1 or 4 residues; see specification as filed for detailed  description of substitutions, R-groups and preferred emb
  c-term may be amidated
XLAADTPTXXFXYTXXXXEEWVQYVDDLELSA

SEQ ID NO: 763 - protein, 32 aa, Artificial Sequence
  Description of Artificial Sequence: Synthetic peptide
  MOD_RES (2)..(2): Any L- or D-natural amino acid and any non-natural amino acid; see  specification as filed for detail ed description of substitutions, R-groups  and preferred embodiments
  MOD_RES (9)..(10): Any L- or D-natural amino acid and any non-natural amino acid; see  specification as filed for detail ed description of substitutions, R-groups  and preferred embodiments
  MOD_RES (12)..(12): Any L- or D-natural amino acid and any non-natural amino acid; see  specification as filed for detail ed description of substitutions, R-groups  and preferred embodiments
  MOD_RES (15)..(18): Any L- or D-natural or non-natural amino acid, and this range may     encompass 1 or 4 residues; see specification as filed for detailed  description of substitutions, R-groups and preferred emb
  c-term may be amidated
SXAADTPTXXFXYTXXXXEEWVQYVDDLELSA

SEQ ID NO: 764 - protein, 32 aa, Artificial Sequence
  Description of Artificial Sequence: Synthetic peptide
  MOD_RES (3)..(3): Any L- or D-natural amino acid and any non-natural amino acid; see  specification as filed for detail ed description of substitutions, R-groups  and preferred embodiments
  MOD_RES (9)..(10): Any L- or D-natural amino acid and any non-natural amino acid; see  specification as filed for detail ed description of substitutions, R-groups  and preferred embodiments
  MOD_RES (12)..(12): Any L- or D-natural amino acid and any non-natural amino acid; see  specification as filed for detail ed description of substitutions, R-groups  and preferred embodiments
  MOD_RES (15)..(18): Any L- or D-natural or non-natural amino acid, and this range may     encompass 1 or 4 residues; see specification as filed for detailed  description of substitutions, R-groups and preferred emb
  c-term may be amidated
SLXADTPTXXFXYTXXXXEEWVQYVDDLELSA

SEQ ID NO: 765 - protein, 32 aa, Artificial Sequence
  Description of Artificial Sequence: Synthetic peptide
  MOD_RES (4)..(4): Any L- or D-natural amino acid and any non-natural amino acid; see  specification as filed for detail ed description of substitutions, R-groups  and preferred embodiments
  MOD_RES (9)..(10): Any L- or D-natural amino acid and any non-natural amino acid; see  specification as filed for detail ed description of substitutions, R-groups  and preferred embodiments
  MOD_RES (12)..(12): Any L- or D-natural amino acid and any non-natural amino acid; see  specification as filed for detail ed description of substitutions, R-groups  and preferred embodiments
  MOD_RES (15)..(18): Any L- or D-natural or non-natural amino acid, and this range may     encompass 1 or 4 residues; see specification as filed for detailed  description of substitutions, R-groups and preferred emb
  c-term may be amidated
SLAXDTPTXXFXYTXXXXEEWVQYVDDLELSA

SEQ ID NO: 766 - protein, 32 aa, Artificial Sequence
  Description of Artificial Sequence: Synthetic peptide
  MOD_RES (5)..(5): Any L- or D-natural amino acid and any non-natural amino acid; see  specification as filed for detail ed description of substitutions, R-groups  and preferred embodiments
  MOD_RES (9)..(10): Any L- or D-natural amino acid and any non-natural amino acid; see  specification as filed for detail ed description of substitutions, R-groups  and preferred embodiments
  MOD_RES (12)..(12): Any L- or D-natural amino acid and any non-natural amino acid; see  specification as filed for detail ed description of substitutions, R-groups  and preferred embodiments
  MOD_RES (15)..(18): Any L- or D-natural or non-natural amino acid, and this range may     encompass 1 or 4 residues; see specification as filed for detailed  description of substitutions, R-groups and preferred emb
  c-term may be amidated
SLAAXTPTXXFXYTXXXXEEWVQYVDDLELSA

SEQ ID NO: 767 - protein, 32 aa, Artificial Sequence
  Description of Artificial Sequence: Synthetic peptide
  MOD_RES (6)..(6): Any L- or D-natural amino acid and any non-natural amino acid; see  specification as filed for detail ed description of substitutions, R-groups  and preferred embodiments
  MOD_RES (9)..(10): Any L- or D-natural amino acid and any non-natural amino acid; see  specification as filed for detail ed description of substitutions, R-groups  and preferred embodiments
  MOD_RES (12)..(12): Any L- or D-natural amino acid and any non-natural amino acid; see  specification as filed for detail ed description of substitutions, R-groups  and preferred embodiments
  MOD_RES (15)..(18): Any L- or D-natural or non-natural amino acid, and this range may     encompass 1 or 4 residues; see specification as filed for detailed  description of substitutions, R-groups and preferred emb
  c-term may be amidated
SLAADXPTXXFXYTXXXXEEWVQYVDDLELSA

SEQ ID NO: 768 - protein, 32 aa, Artificial Sequence
  Description of Artificial Sequence: Synthetic peptide
  MOD_RES (7)..(7): Any L- or D-natural amino acid and any non-natural amino acid; see  specification as filed for detail ed description of substitutions, R-groups  and preferred embodiments
  MOD_RES (9)..(10): Any L- or D-natural amino acid and any non-natural amino acid; see  specification as filed for detail ed description of substitutions, R-groups  and preferred embodiments
  MOD_RES (12)..(12): Any L- or D-natural amino acid and any non-natural amino acid; see  specification as filed for detail ed description of substitutions, R-groups  and preferred embodiments
  MOD_RES (15)..(18): Any L- or D-natural or non-natural amino acid, and this range may     encompass 1 or 4 residues; see specification as filed for detailed  description of substitutions, R-groups and preferred emb
  c-term may be amidated
SLAADTXTXXFXYTXXXXEEWVQYVDDLELSA

SEQ ID NO: 769 - protein, 32 aa, Artificial Sequence
  Description of Artificial Sequence: Synthetic peptide
  MOD_RES (8)..(10): Any L- or D-natural amino acid and any non-natural amino acid; see  specification as filed for detail ed description of substitutions, R-groups  and preferred embodiments
  MOD_RES (12)..(12): Any L- or D-natural amino acid and any non-natural amino acid; see  specification as filed for detail ed description of substitutions, R-groups  and preferred embodiments
  MOD_RES (15)..(18): Any L- or D-natural or non-natural amino acid, and this range may     encompass 1 or 4 residues; see specification as filed for detailed  description of substitutions, R-groups and preferred emb
  c-term may be amidated
SLAADTPXXXFXYTXXXXEEWVQYVDDLELSA

SEQ ID NO: 770 - protein, 32 aa, Artificial Sequence
  Description of Artificial Sequence: Synthetic peptide
  MOD_RES (9)..(10): Any L- or D-natural amino acid and any non-natural amino acid; see  specification as filed for detail ed description of substitutions, R-groups  and preferred embodiments
  MOD_RES (13)..(13): Any L- or D-natural amino acid and any non-natural amino acid; see  specification as filed for detail ed description of substitutions, R-groups  and preferred embodiments
  MOD_RES (15)..(18): Any L- or D-natural or non-natural amino acid, and this range may     encompass 1 or 4 residues; see specification as filed for detailed  description of substitutions, R-groups and preferred emb
  c-term may be amidated
SLAADTPTXXFSXTXXXXEEWVQYVDDLELSA

SEQ ID NO: 771 - protein, 32 aa, Artificial Sequence
  Description of Artificial Sequence: Synthetic peptide
  MOD_RES (1)..(1): Any L- or D-natural amino acid and any non-natural amino acid; see  specification as filed for detail ed description of substitutions, R-groups  and preferred embodiments
  MOD_RES (9)..(10): Any L- or D-natural amino acid and any non-natural amino acid; see  specification as filed for detail ed description of substitutions, R-groups  and preferred embodiments
  MOD_RES (13)..(13): Any L- or D-natural amino acid and any non-natural amino acid; see  specification as filed for detail ed description of substitutions, R-groups  and preferred embodiments
  MOD_RES (15)..(18): Any L- or D-natural or non-natural amino acid, and this range may     encompass 1 or 4 residues; see specification as filed for detailed  description of substitutions, R-groups and preferred emb
  c-term may be amidated
XLAADTPTXXFSXTXXXXEEWVQYVDDLELSA

SEQ ID NO: 772 - protein, 32 aa, Artificial Sequence
  Description of Artificial Sequence: Synthetic peptide
  MOD_RES (2)..(2): Any L- or D-natural amino acid and any non-natural amino acid; see  specification as filed for detail ed description of substitutions, R-groups  and preferred embodiments
  MOD_RES (9)..(10): Any L- or D-natural amino acid and any non-natural amino acid; see  specification as filed for detail ed description of substitutions, R-groups  and preferred embodiments
  MOD_RES (13)..(13): Any L- or D-natural amino acid and any non-natural amino acid; see  specification as filed for detail ed description of substitutions, R-groups  and preferred embodiments
  MOD_RES (15)..(18): Any L- or D-natural or non-natural amino acid, and this range may     encompass 1 or 4 residues; see specification as filed for detailed  description of substitutions, R-groups and preferred emb
  c-term may be amidated
SXAADTPTXXFSXTXXXXEEWVQYVDDLELSA

SEQ ID NO: 773 - protein, 32 aa, Artificial Sequence
  Description of Artificial Sequence: Synthetic peptide
  MOD_RES (3)..(3): Any L- or D-natural amino acid and any non-natural amino acid; see  specification as filed for detail ed description of substitutions, R-groups  and preferred embodiments
  MOD_RES (9)..(10): Any L- or D-natural amino acid and any non-natural amino acid; see  specification as filed for detail ed description of substitutions, R-groups  and preferred embodiments
  MOD_RES (13)..(13): Any L- or D-natural amino acid and any non-natural amino acid; see  specification as filed for detail ed description of substitutions, R-groups  and preferred embodiments
  MOD_RES (15)..(18): Any L- or D-natural or non-natural amino acid, and this range may     encompass 1 or 4 residues; see specification as filed for detailed  description of substitutions, R-groups and preferred emb
  c-term may be amidated
SLXADTPTXXFSXTXXXXEEWVQYVDDLELSA

SEQ ID NO: 774 - protein, 32 aa, Artificial Sequence
  Description of Artificial Sequence: Synthetic peptide
  MOD_RES (4)..(4): Any L- or D-natural amino acid and any non-natural amino acid; see  specification as filed for detail ed description of substitutions, R-groups  and preferred embodiments
  MOD_RES (9)..(10): Any L- or D-natural amino acid and any non-natural amino acid; see  specification as filed for detail ed description of substitutions, R-groups  and preferred embodiments
  MOD_RES (13)..(13): Any L- or D-natural amino acid and any non-natural amino acid; see  specification as filed for detail ed description of substitutions, R-groups  and preferred embodiments
  MOD_RES (15)..(18): Any L- or D-natural or non-natural amino acid, and this range may     encompass 1 or 4 residues; see specification as filed for detailed  description of substitutions, R-groups and preferred emb
  c-term may be amidated
SLAXDTPTXXFSXTXXXXEEWVQYVDDLELSA

SEQ ID NO: 775 - protein, 32 aa, Artificial Sequence
  Description of Artificial Sequence: Synthetic peptide
  MOD_RES (5)..(5): Any L- or D-natural amino acid and any non-natural amino acid; see  specification as filed for detail ed description of substitutions, R-groups  and preferred embodiments
  MOD_RES (9)..(10): Any L- or D-natural amino acid and any non-natural amino acid; see  specification as filed for detail ed description of substitutions, R-groups  and preferred embodiments
  MOD_RES (13)..(13): Any L- or D-natural amino acid and any non-natural amino acid; see  specification as filed for detail ed description of substitutions, R-groups  and preferred embodiments
  MOD_RES (15)..(18): Any L- or D-natural or non-natural amino acid, and this range may     encompass 1 or 4 residues; see specification as filed for detailed  description of substitutions, R-groups and preferred emb
  c-term may be amidated
SLAAXTPTXXFSXTXXXXEEWVQYVDDLELSA

SEQ ID NO: 776 - protein, 32 aa, Artificial Sequence
  Description of Artificial Sequence: Synthetic peptide
  MOD_RES (6)..(6): Any L- or D-natural amino acid and any non-natural amino acid; see  specification as filed for detail ed description of substitutions, R-groups  and preferred embodiments
  MOD_RES (9)..(10): Any L- or D-natural amino acid and any non-natural amino acid; see  specification as filed for detail ed description of substitutions, R-groups  and preferred embodiments
  MOD_RES (13)..(13): Any L- or D-natural amino acid and any non-natural amino acid; see  specification as filed for detail ed description of substitutions, R-groups  and preferred embodiments
  MOD_RES (15)..(18): Any L- or D-natural or non-natural amino acid, and this range may     encompass 1 or 4 residues; see specification as filed for detailed  description of substitutions, R-groups and preferred emb
  c-term may be amidated
SLAADXPTXXFSXTXXXXEEWVQYVDDLELSA

SEQ ID NO: 777 - protein, 32 aa, Artificial Sequence
  Description of Artificial Sequence: Synthetic peptide
  MOD_RES (7)..(7): Any L- or D-natural amino acid and any non-natural amino acid; see  specification as filed for detail ed description of substitutions, R-groups  and preferred embodiments
  MOD_RES (9)..(10): Any L- or D-natural amino acid and any non-natural amino acid; see  specification as filed for detail ed description of substitutions, R-groups  and preferred embodiments
  MOD_RES (13)..(13): Any L- or D-natural amino acid and any non-natural amino acid; see  specification as filed for detail ed description of substitutions, R-groups  and preferred embodiments
  MOD_RES (15)..(18): Any L- or D-natural or non-natural amino acid, and this range may     encompass 1 or 4 residues; see specification as filed for detailed  description of substitutions, R-groups and preferred emb
  c-term may be amidated
SLAADTXTXXFSXTXXXXEEWVQYVDDLELSA

SEQ ID NO: 778 - protein, 32 aa, Artificial Sequence
  Description of Artificial Sequence: Synthetic peptide
  MOD_RES (8)..(10): Any L- or D-natural amino acid and any non-natural amino acid; see  specification as filed for detail ed description of substitutions, R-groups  and preferred embodiments
  MOD_RES (13)..(13): Any L- or D-natural amino acid and any non-natural amino acid; see  specification as filed for detail ed description of substitutions, R-groups  and preferred embodiments
  MOD_RES (15)..(18): Any L- or D-natural or non-natural amino acid, and this range may     encompass 1 or 4 residues; see specification as filed for detailed  description of substitutions, R-groups and preferred emb
  c-term may be amidated
SLAADTPXXXFSXTXXXXEEWVQYVDDLELSA

SEQ ID NO: 779 - protein, 32 aa, Artificial Sequence
  Description of Artificial Sequence: Synthetic peptide
  MOD_RES (9)..(10): Any L- or D-natural amino acid and any non-natural amino acid; see  specification as filed for detail ed description of substitutions, R-groups  and preferred embodiments
  MOD_RES (14)..(14): Any L- or D-natural amino acid and any non-natural amino acid; see  specification as filed for detail ed description of substitutions, R-groups  and preferred embodiments
  MOD_RES (15)..(18): Any L- or D-natural or non-natural amino acid, and this range may     encompass 1 or 4 residues; see specification as filed for detailed  description of substitutions, R-groups and preferred emb
  c-term may be amidated
SLAADTPTXXFSYXXXXXEEWVQYVDDLELSA

SEQ ID NO: 780 - protein, 32 aa, Artificial Sequence
  Description of Artificial Sequence: Synthetic peptide
  MOD_RES (1)..(1): Any L- or D-natural amino acid and any non-natural amino acid; see  specification as filed for detail ed description of substitutions, R-groups  and preferred embodiments
  MOD_RES (9)..(10): Any L- or D-natural amino acid and any non-natural amino acid; see  specification as filed for detail ed description of substitutions, R-groups  and preferred embodiments
  MOD_RES (14)..(14): Any L- or D-natural amino acid and any non-natural amino acid; see  specification as filed for detail ed description of substitutions, R-groups  and preferred embodiments
  MOD_RES (15)..(18): Any L- or D-natural or non-natural amino acid, and this range may     encompass 1 or 4 residues; see specification as filed for detailed  description of substitutions, R-groups and preferred emb
  c-term may be amidated
XLAADTPTXXFSYXXXXXEEWVQYVDDLELSA

SEQ ID NO: 781 - protein, 32 aa, Artificial Sequence
  Description of Artificial Sequence: Synthetic peptide
  MOD_RES (2)..(2): Any L- or D-natural amino acid and any non-natural amino acid; see  specification as filed for detail ed description of substitutions, R-groups  and preferred embodiments
  MOD_RES (9)..(10): Any L- or D-natural amino acid and any non-natural amino acid; see  specification as filed for detail ed description of substitutions, R-groups  and preferred embodiments
  MOD_RES (14)..(14): Any L- or D-natural amino acid and any non-natural amino acid; see  specification as filed for detail ed description of substitutions, R-groups  and preferred embodiments
  MOD_RES (15)..(18): Any L- or D-natural or non-natural amino acid, and this range may     encompass 1 or 4 residues; see specification as filed for detailed  description of substitutions, R-groups and preferred emb
  c-term may be amidated
SXAADTPTXXFSYXXXXXEEWVQYVDDLELSA

SEQ ID NO: 782 - protein, 32 aa, Artificial Sequence
  Description of Artificial Sequence: Synthetic peptide
  MOD_RES (3)..(3): Any L- or D-natural amino acid and any non-natural amino acid; see  specification as filed for detail ed description of substitutions, R-groups  and preferred embodiments
  MOD_RES (9)..(10): Any L- or D-natural amino acid and any non-natural amino acid; see  specification as filed for detail ed description of substitutions, R-groups  and preferred embodiments
  MOD_RES (14)..(14): Any L- or D-natural amino acid and any non-natural amino acid; see  specification as filed for detail ed description of substitutions, R-groups  and preferred embodiments
  MOD_RES (15)..(18): Any L- or D-natural or non-natural amino acid, and this range may     encompass 1 or 4 residues; see specification as filed for detailed  description of substitutions, R-groups and preferred emb
  c-term may be amidated
SLXADTPTXXFSYXXXXXEEWVQYVDDLELSA

SEQ ID NO: 783 - protein, 32 aa, Artificial Sequence
  Description of Artificial Sequence: Synthetic peptide
  MOD_RES (4)..(4): Any L- or D-natural amino acid and any non-natural amino acid; see  specification as filed for detail ed description of substitutions, R-groups  and preferred embodiments
  MOD_RES (9)..(10): Any L- or D-natural amino acid and any non-natural amino acid; see  specification as filed for detail ed description of substitutions, R-groups  and preferred embodiments
  MOD_RES (14)..(14): Any L- or D-natural amino acid and any non-natural amino acid; see  specification as filed for detail ed description of substitutions, R-groups  and preferred embodiments
  MOD_RES (15)..(18): Any L- or D-natural or non-natural amino acid, and this range may     encompass 1 or 4 residues; see specification as filed for detailed  description of substitutions, R-groups and preferred emb
  c-term may be amidated
SLAXDTPTXXFSYXXXXXEEWVQYVDDLELSA

SEQ ID NO: 784 - protein, 32 aa, Artificial Sequence
  Description of Artificial Sequence: Synthetic peptide
  MOD_RES (5)..(5): Any L- or D-natural amino acid and any non-natural amino acid; see  specification as filed for detail ed description of substitutions, R-groups  and preferred embodiments
  MOD_RES (9)..(10): Any L- or D-natural amino acid and any non-natural amino acid; see  specification as filed for detail ed description of substitutions, R-groups  and preferred embodiments
  MOD_RES (14)..(14): Any L- or D-natural amino acid and any non-natural amino acid; see  specification as filed for detail ed description of substitutions, R-groups  and preferred embodiments
  MOD_RES (15)..(18): Any L- or D-natural or non-natural amino acid, and this range may     encompass 1 or 4 residues; see specification as filed for detailed  description of substitutions, R-groups and preferred emb
  c-term may be amidated
SLAAXTPTXXFSYXXXXXEEWVQYVDDLELSA

SEQ ID NO: 785 - protein, 32 aa, Artificial Sequence
  Description of Artificial Sequence: Synthetic peptide
  MOD_RES (6)..(6): Any L- or D-natural amino acid and any non-natural amino acid; see  specification as filed for detail ed description of substitutions, R-groups  and preferred embodiments
  MOD_RES (9)..(10): Any L- or D-natural amino acid and any non-natural amino acid; see  specification as filed for detail ed description of substitutions, R-groups  and preferred embodiments
  MOD_RES (14)..(14): Any L- or D-natural amino acid and any non-natural amino acid; see  specification as filed for detail ed description of substitutions, R-groups  and preferred embodiments
  MOD_RES (15)..(18): Any L- or D-natural or non-natural amino acid, and this range may     encompass 1 or 4 residues; see specification as filed for detailed  description of substitutions, R-groups and preferred emb
  c-term may be amidated
SLAADXPTXXFSYXXXXXEEWVQYVDDLELSA

SEQ ID NO: 786 - protein, 32 aa, Artificial Sequence
  Description of Artificial Sequence: Synthetic peptide
  MOD_RES (7)..(7): Any L- or D-natural amino acid and any non-natural amino acid; see  specification as filed for detail ed description of substitutions, R-groups  and preferred embodiments
  MOD_RES (9)..(10): Any L- or D-natural amino acid and any non-natural amino acid; see  specification as filed for detail ed description of substitutions, R-groups  and preferred embodiments
  MOD_RES (14)..(14): Any L- or D-natural amino acid and any non-natural amino acid; see  specification as filed for detail ed description of substitutions, R-groups  and preferred embodiments
  MOD_RES (15)..(18): Any L- or D-natural or non-natural amino acid, and this range may     encompass 1 or 4 residues; see specification as filed for detailed  description of substitutions, R-groups and preferred emb
  c-term may be amidated
SLAADTXTXXFSYXXXXXEEWVQYVDDLELSA

SEQ ID NO: 787 - protein, 32 aa, Artificial Sequence
  Description of Artificial Sequence: Synthetic peptide
  MOD_RES (8)..(10): Any L- or D-natural amino acid and any non-natural amino acid; see  specification as filed for detail ed description of substitutions, R-groups  and preferred embodiments
  MOD_RES (14)..(14): Any L- or D-natural amino acid and any non-natural amino acid; see  specification as filed for detail ed description of substitutions, R-groups  and preferred embodiments
  MOD_RES (15)..(18): Any L- or D-natural or non-natural amino acid, and this range may     encompass 1 or 4 residues; see specification as filed for detailed  description of substitutions, R-groups and preferred emb
  c-term may be amidated
SLAADTPXXXFSYXXXXXEEWVQYVDDLELSA

SEQ ID NO: 788 - protein, 32 aa, Artificial Sequence
  Description of Artificial Sequence: Synthetic peptide
  MOD_RES (15)..(18): Any L- or D-natural or non-natural amino acid, and this range may     encompass 1 or 4 residues; see specification as filed for detailed  description of substitutions, R-groups and preferred emb
  c-term may be amidated
SLAADTPTCCFSYTXXXXEEWVKYVDDLELSA

SEQ ID NO: 789 - protein, 32 aa, Artificial Sequence
  Description of Artificial Sequence: Synthetic peptide
  MOD_RES (9)..(10): Any L- or D-natural amino acid and any non-natural amino acid; see  specification as filed for detail ed description of substitutions, R-groups  and preferred embodiments
  MOD_RES (15)..(18): Any L- or D-natural or non-natural amino acid, and this range may     encompass 1 or 4 residues; see specification as filed for detailed  description of substitutions, R-groups and preferred emb
  c-term may be amidated
SLAADTPTXXFSYTXXXXEEWVKYVDDLELSA

SEQ ID NO: 790 - protein, 32 aa, Artificial Sequence
  Description of Artificial Sequence: Synthetic peptide
  MOD_RES (1)..(1): Any L- or D-natural amino acid and any non-natural amino acid; see  specification as filed for detail ed description of substitutions, R-groups  and preferred embodiments
  MOD_RES (9)..(10): Any L- or D-natural amino acid and any non-natural amino acid; see  specification as filed for detail ed description of substitutions, R-groups  and preferred embodiments
  MOD_RES (15)..(18): Any L- or D-natural or non-natural amino acid, and this range may     encompass 1 or 4 residues; see specification as filed for detailed  description of substitutions, R-groups and preferred emb
  c-term may be amidated
XLAADTPTXXFSYTXXXXEEWVKYVDDLELSA

SEQ ID NO: 791 - protein, 32 aa, Artificial Sequence
  Description of Artificial Sequence: Synthetic peptide
  MOD_RES (2)..(2): Any L- or D-natural amino acid and any non-natural amino acid; see  specification as filed for detail ed description of substitutions, R-groups  and preferred embodiments
  MOD_RES (9)..(10): Any L- or D-natural amino acid and any non-natural amino acid; see  specification as filed for detail ed description of substitutions, R-groups  and preferred embodiments
  MOD_RES (15)..(18): Any L- or D-natural or non-natural amino acid, and this range may     encompass 1 or 4 residues; see specification as filed for detailed  description of substitutions, R-groups and preferred emb
  c-term may be amidated
SXAADTPTXXFSYTXXXXEEWVKYVDDLELSA

SEQ ID NO: 792 - protein, 32 aa, Artificial Sequence
  Description of Artificial Sequence: Synthetic peptide
  MOD_RES (3)..(3): Any L- or D-natural amino acid and any non-natural amino acid; see  specification as filed for detail ed description of substitutions, R-groups  and preferred embodiments
  MOD_RES (9)..(10): Any L- or D-natural amino acid and any non-natural amino acid; see  specification as filed for detail ed description of substitutions, R-groups  and preferred embodiments
  MOD_RES (15)..(18): Any L- or D-natural or non-natural amino acid, and this range may     encompass 1 or 4 residues; see specification as filed for detailed  description of substitutions, R-groups and preferred emb
  c-term may be amidated
SLXADTPTXXFSYTXXXXEEWVKYVDDLELSA

SEQ ID NO: 793 - protein, 32 aa, Artificial Sequence
  Description of Artificial Sequence: Synthetic peptide
  MOD_RES (4)..(4): Any L- or D-natural amino acid and any non-natural amino acid; see  specification as filed for detail ed description of substitutions, R-groups  and preferred embodiments
  MOD_RES (9)..(10): Any L- or D-natural amino acid and any non-natural amino acid; see  specification as filed for detail ed description of substitutions, R-groups  and preferred embodiments
  MOD_RES (15)..(18): Any L- or D-natural or non-natural amino acid, and this range may     encompass 1 or 4 residues; see specification as filed for detailed  description of substitutions, R-groups and preferred emb
  c-term may be amidated
SLAXDTPTXXFSYTXXXXEEWVKYVDDLELSA

SEQ ID NO: 794 - protein, 32 aa, Artificial Sequence
  Description of Artificial Sequence: Synthetic peptide
  MOD_RES (5)..(5): Any L- or D-natural amino acid and any non-natural amino acid; see  specification as filed for detail ed description of substitutions, R-groups  and preferred embodiments
  MOD_RES (9)..(10): Any L- or D-natural amino acid and any non-natural amino acid; see  specification as filed for detail ed description of substitutions, R-groups  and preferred embodiments
  MOD_RES (15)..(18): Any L- or D-natural or non-natural amino acid, and this range may     encompass 1 or 4 residues; see specification as filed for detailed  description of substitutions, R-groups and preferred emb
  c-term may be amidated
SLAAXTPTXXFSYTXXXXEEWVKYVDDLELSA

SEQ ID NO: 795 - protein, 32 aa, Artificial Sequence
  Description of Artificial Sequence: Synthetic peptide
  MOD_RES (6)..(6): Any L- or D-natural amino acid and any non-natural amino acid; see  specification as filed for detail ed description of substitutions, R-groups  and preferred embodiments
  MOD_RES (9)..(10): Any L- or D-natural amino acid and any non-natural amino acid; see  specification as filed for detail ed description of substitutions, R-groups  and preferred embodiments
  MOD_RES (15)..(18): Any L- or D-natural or non-natural amino acid, and this range may     encompass 1 or 4 residues; see specification as filed for detailed  description of substitutions, R-groups and preferred emb
  c-term may be amidated
SLAADXPTXXFSYTXXXXEEWVKYVDDLELSA

SEQ ID NO: 796 - protein, 32 aa, Artificial Sequence
  Description of Artificial Sequence: Synthetic peptide
  MOD_RES (7)..(7): Any L- or D-natural amino acid and any non-natural amino acid; see  specification as filed for detail ed description of substitutions, R-groups  and preferred embodiments
  MOD_RES (9)..(10): Any L- or D-natural amino acid and any non-natural amino acid; see  specification as filed for detail ed description of substitutions, R-groups  and preferred embodiments
  MOD_RES (15)..(18): Any L- or D-natural or non-natural amino acid, and this range may     encompass 1 or 4 residues; see specification as filed for detailed  description of substitutions, R-groups and preferred emb
  c-term may be amidated
SLAADTXTXXFSYTXXXXEEWVKYVDDLELSA

SEQ ID NO: 797 - protein, 32 aa, Artificial Sequence
  Description of Artificial Sequence: Synthetic peptide
  MOD_RES (8)..(10): Any L- or D-natural amino acid and any non-natural amino acid; see  specification as filed for detail ed description of substitutions, R-groups  and preferred embodiments
  MOD_RES (15)..(18): Any L- or D-natural or non-natural amino acid, and this range may     encompass 1 or 4 residues; see specification as filed for detailed  description of substitutions, R-groups and preferred emb
  c-term may be amidated
SLAADTPXXXFSYTXXXXEEWVKYVDDLELSA

SEQ ID NO: 798 - protein, 32 aa, Artificial Sequence
  Description of Artificial Sequence: Synthetic peptide
  MOD_RES (9)..(11): Any L- or D-natural amino acid and any non-natural amino acid; see  specification as filed for detail ed description of substitutions, R-groups  and preferred embodiments
  MOD_RES (15)..(18): Any L- or D-natural or non-natural amino acid, and this range may     encompass 1 or 4 residues; see specification as filed for detailed  description of substitutions, R-groups and preferred emb
  c-term may be amidated
SLAADTPTXXXSYTXXXXEEWVKYVDDLELSA

SEQ ID NO: 799 - protein, 32 aa, Artificial Sequence
  Description of Artificial Sequence: Synthetic peptide
  MOD_RES (1)..(1): Any L- or D-natural amino acid and any non-natural amino acid; see  specification as filed for detail ed description of substitutions, R-groups  and preferred embodiments
  MOD_RES (9)..(11): Any L- or D-natural amino acid and any non-natural amino acid; see  specification as filed for detail ed description of substitutions, R-groups  and preferred embodiments
  MOD_RES (15)..(18): Any L- or D-natural or non-natural amino acid, and this range may     encompass 1 or 4 residues; see specification as filed for detailed  description of substitutions, R-groups and preferred emb
  c-term may be amidated
XLAADTPTXXXSYTXXXXEEWVKYVDDLELSA

SEQ ID NO: 800 - protein, 32 aa, Artificial Sequence
  Description of Artificial Sequence: Synthetic peptide
  MOD_RES (2)..(2): Any L- or D-natural amino acid and any non-natural amino acid; see  specification as filed for detail ed description of substitutions, R-groups  and preferred embodiments
  MOD_RES (9)..(11): Any L- or D-natural amino acid and any non-natural amino acid; see  specification as filed for detail ed description of substitutions, R-groups  and preferred embodiments
  MOD_RES (15)..(18): Any L- or D-natural or non-natural amino acid, and this range may     encompass 1 or 4 residues; see specification as filed for detailed  description of substitutions, R-groups and preferred emb
  c-term may be amidated
SXAADTPTXXXSYTXXXXEEWVKYVDDLELSA

SEQ ID NO: 801 - protein, 32 aa, Artificial Sequence
  Description of Artificial Sequence: Synthetic peptide
  MOD_RES (3)..(3): Any L- or D-natural amino acid and any non-natural amino acid; see  specification as filed for detail ed description of substitutions, R-groups  and preferred embodiments
  MOD_RES (9)..(11): Any L- or D-natural amino acid and any non-natural amino acid; see  specification as filed for detail ed description of substitutions, R-groups  and preferred embodiments
  MOD_RES (15)..(18): Any L- or D-natural or non-natural amino acid, and this range may     encompass 1 or 4 residues; see specification as filed for detailed  description of substitutions, R-groups and preferred emb
  c-term may be amidated
SLXADTPTXXXSYTXXXXEEWVKYVDDLELSA

SEQ ID NO: 802 - protein, 32 aa, Artificial Sequence
  Description of Artificial Sequence: Synthetic peptide
  MOD_RES (4)..(4): Any L- or D-natural amino acid and any non-natural amino acid; see  specification as filed for detail ed description of substitutions, R-groups  and preferred embodiments
  MOD_RES (9)..(11): Any L- or D-natural amino acid and any non-natural amino acid; see  specification as filed for detail ed description of substitutions, R-groups  and preferred embodiments
  MOD_RES (15)..(18): Any L- or D-natural or non-natural amino acid, and this range may     encompass 1 or 4 residues; see specification as filed for detailed  description of substitutions, R-groups and preferred emb
  c-term may be amidated
SLAXDTPTXXXSYTXXXXEEWVKYVDDLELSA

SEQ ID NO: 803 - protein, 32 aa, Artificial Sequence
  Description of Artificial Sequence: Synthetic peptide
  MOD_RES (5)..(5): Any L- or D-natural amino acid and any non-natural amino acid; see  specification as filed for detail ed description of substitutions, R-groups  and preferred embodiments
  MOD_RES (9)..(11): Any L- or D-natural amino acid and any non-natural amino acid; see  specification as filed for detail ed description of substitutions, R-groups  and preferred embodiments
  MOD_RES (15)..(18): Any L- or D-natural or non-natural amino acid, and this range may     encompass 1 or 4 residues; see specification as filed for detailed  description of substitutions, R-groups and preferred emb
  c-term may be amidated
SLAAXTPTXXXSYTXXXXEEWVKYVDDLELSA

SEQ ID NO: 804 - protein, 32 aa, Artificial Sequence
  Description of Artificial Sequence: Synthetic peptide
  MOD_RES (6)..(6): Any L- or D-natural amino acid and any non-natural amino acid; see  specification as filed for detail ed description of substitutions, R-groups  and preferred embodiments
  MOD_RES (9)..(11): Any L- or D-natural amino acid and any non-natural amino acid; see  specification as filed for detail ed description of substitutions, R-groups  and preferred embodiments
  MOD_RES (15)..(18): Any L- or D-natural or non-natural amino acid, and this range may     encompass 1 or 4 residues; see specification as filed for detailed  description of substitutions, R-groups and preferred emb
  c-term may be amidated
SLAADXPTXXXSYTXXXXEEWVKYVDDLELSA

SEQ ID NO: 805 - protein, 32 aa, Artificial Sequence
  Description of Artificial Sequence: Synthetic peptide
  MOD_RES (7)..(7): Any L- or D-natural amino acid and any non-natural amino acid; see  specification as filed for detail ed description of substitutions, R-groups  and preferred embodiments
  MOD_RES (9)..(11): Any L- or D-natural amino acid and any non-natural amino acid; see  specification as filed for detail ed description of substitutions, R-groups  and preferred embodiments
  MOD_RES (15)..(18): Any L- or D-natural or non-natural amino acid, and this range may     encompass 1 or 4 residues; see specification as filed for detailed  description of substitutions, R-groups and preferred emb
  c-term may be amidated
SLAADTXTXXXSYTXXXXEEWVKYVDDLELSA

SEQ ID NO: 806 - protein, 32 aa, Artificial Sequence
  Description of Artificial Sequence: Synthetic peptide
  MOD_RES (8)..(11): Any L- or D-natural amino acid and any non-natural amino acid; see  specification as filed for detail ed description of substitutions, R-groups  and preferred embodiments
  MOD_RES (15)..(18): Any L- or D-natural or non-natural amino acid, and this range may     encompass 1 or 4 residues; see specification as filed for detailed  description of substitutions, R-groups and preferred emb
  c-term may be amidated
SLAADTPXXXXSYTXXXXEEWVKYVDDLELSA

SEQ ID NO: 807 - protein, 32 aa, Artificial Sequence
  Description of Artificial Sequence: Synthetic peptide
  MOD_RES (9)..(10): Any L- or D-natural amino acid and any non-natural amino acid; see  specification as filed for detail ed description of substitutions, R-groups  and preferred embodiments
  MOD_RES (12)..(12): Any L- or D-natural amino acid and any non-natural amino acid; see  specification as filed for detail ed description of substitutions, R-groups  and preferred embodiments
  MOD_RES (15)..(18): Any L- or D-natural or non-natural amino acid, and this range may     encompass 1 or 4 residues; see specification as filed for detailed  description of substitutions, R-groups and preferred emb
  c-term may be amidated
SLAADTPTXXFXYTXXXXEEWVKYVDDLELSA

SEQ ID NO: 808 - protein, 32 aa, Artificial Sequence
  Description of Artificial Sequence: Synthetic peptide
  MOD_RES (1)..(1): Any L- or D-natural amino acid and any non-natural amino acid; see  specification as filed for detail ed description of substitutions, R-groups  and preferred embodiments
  MOD_RES (9)..(10): Any L- or D-natural amino acid and any non-natural amino acid; see  specification as filed for detail ed description of substitutions, R-groups  and preferred embodiments
  MOD_RES (12)..(12): Any L- or D-natural amino acid and any non-natural amino acid; see  specification as filed for detail ed description of substitutions, R-groups  and preferred embodiments
  MOD_RES (15)..(18): Any L- or D-natural or non-natural amino acid, and this range may     encompass 1 or 4 residues; see specification as filed for detailed  description of substitutions, R-groups and preferred emb
  c-term may be amidated
XLAADTPTXXFXYTXXXXEEWVKYVDDLELSA

SEQ ID NO: 809 - protein, 32 aa, Artificial Sequence
  Description of Artificial Sequence: Synthetic peptide
  MOD_RES (2)..(2): Any L- or D-natural amino acid and any non-natural amino acid; see  specification as filed for detail ed description of substitutions, R-groups  and preferred embodiments
  MOD_RES (9)..(10): Any L- or D-natural amino acid and any non-natural amino acid; see  specification as filed for detail ed description of substitutions, R-groups  and preferred embodiments
  MOD_RES (12)..(12): Any L- or D-natural amino acid and any non-natural amino acid; see  specification as filed for detail ed description of substitutions, R-groups  and preferred embodiments
  MOD_RES (15)..(18): Any L- or D-natural or non-natural amino acid, and this range may     encompass 1 or 4 residues; see specification as filed for detailed  description of substitutions, R-groups and preferred emb
  c-term may be amidated
SXAADTPTXXFXYTXXXXEEWVKYVDDLELSA

SEQ ID NO: 810 - protein, 32 aa, Artificial Sequence
  Description of Artificial Sequence: Synthetic peptide
  MOD_RES (3)..(3): Any L- or D-natural amino acid and any non-natural amino acid; see  specification as filed for detail ed description of substitutions, R-groups  and preferred embodiments
  MOD_RES (9)..(10): Any L- or D-natural amino acid and any non-natural amino acid; see  specification as filed for detail ed description of substitutions, R-groups  and preferred embodiments
  MOD_RES (12)..(12): Any L- or D-natural amino acid and any non-natural amino acid; see  specification as filed for detail ed description of substitutions, R-groups  and preferred embodiments
  MOD_RES (15)..(18): Any L- or D-natural or non-natural amino acid, and this range may     encompass 1 or 4 residues; see specification as filed for detailed  description of substitutions, R-groups and preferred emb
  c-term may be amidated
SLXADTPTXXFXYTXXXXEEWVKYVDDLELSA

SEQ ID NO: 811 - protein, 32 aa, Artificial Sequence
  Description of Artificial Sequence: Synthetic peptide
  MOD_RES (4)..(4): Any L- or D-natural amino acid and any non-natural amino acid; see  specification as filed for detail ed description of substitutions, R-groups  and preferred embodiments
  MOD_RES (9)..(10): Any L- or D-natural amino acid and any non-natural amino acid; see  specification as filed for detail ed description of substitutions, R-groups  and preferred embodiments
  MOD_RES (12)..(12): Any L- or D-natural amino acid and any non-natural amino acid; see  specification as filed for detail ed description of substitutions, R-groups  and preferred embodiments
  MOD_RES (15)..(18): Any L- or D-natural or non-natural amino acid, and this range may     encompass 1 or 4 residues; see specification as filed for detailed  description of substitutions, R-groups and preferred emb
  c-term may be amidated
SLAXDTPTXXFXYTXXXXEEWVKYVDDLELSA

SEQ ID NO: 812 - protein, 32 aa, Artificial Sequence
  Description of Artificial Sequence: Synthetic peptide
  MOD_RES (5)..(5): Any L- or D-natural amino acid and any non-natural amino acid; see  specification as filed for detail ed description of substitutions, R-groups  and preferred embodiments
  MOD_RES (9)..(10): Any L- or D-natural amino acid and any non-natural amino acid; see  specification as filed for detail ed description of substitutions, R-groups  and preferred embodiments
  MOD_RES (12)..(12): Any L- or D-natural amino acid and any non-natural amino acid; see  specification as filed for detail ed description of substitutions, R-groups  and preferred embodiments
  MOD_RES (15)..(18): Any L- or D-natural or non-natural amino acid, and this range may     encompass 1 or 4 residues; see specification as filed for detailed  description of substitutions, R-groups and preferred emb
  c-term may be amidated
SLAAXTPTXXFXYTXXXXEEWVKYVDDLELSA

SEQ ID NO: 813 - protein, 32 aa, Artificial Sequence
  Description of Artificial Sequence: Synthetic peptide
  MOD_RES (6)..(6): Any L- or D-natural amino acid and any non-natural amino acid; see  specification as filed for detail ed description of substitutions, R-groups  and preferred embodiments
  MOD_RES (9)..(10): Any L- or D-natural amino acid and any non-natural amino acid; see  specification as filed for detail ed description of substitutions, R-groups  and preferred embodiments
  MOD_RES (12)..(12): Any L- or D-natural amino acid and any non-natural amino acid; see  specification as filed for detail ed description of substitutions, R-groups  and preferred embodiments
  MOD_RES (15)..(18): Any L- or D-natural or non-natural amino acid, and this range may     encompass 1 or 4 residues; see specification as filed for detailed  description of substitutions, R-groups and preferred emb
  c-term may be amidated
SLAADXPTXXFXYTXXXXEEWVKYVDDLELSA

SEQ ID NO: 814 - protein, 32 aa, Artificial Sequence
  Description of Artificial Sequence: Synthetic peptide
  MOD_RES (7)..(7): Any L- or D-natural amino acid and any non-natural amino acid; see  specification as filed for detail ed description of substitutions, R-groups  and preferred embodiments
  MOD_RES (9)..(10): Any L- or D-natural amino acid and any non-natural amino acid; see  specification as filed for detail ed description of substitutions, R-groups  and preferred embodiments
  MOD_RES (12)..(12): Any L- or D-natural amino acid and any non-natural amino acid; see  specification as filed for detail ed description of substitutions, R-groups  and preferred embodiments
  MOD_RES (15)..(18): Any L- or D-natural or non-natural amino acid, and this range may     encompass 1 or 4 residues; see specification as filed for detailed  description of substitutions, R-groups and preferred emb
  c-term may be amidated
SLAADTXTXXFXYTXXXXEEWVKYVDDLELSA

SEQ ID NO: 815 - protein, 32 aa, Artificial Sequence
  Description of Artificial Sequence: Synthetic peptide
  MOD_RES (8)..(10): Any L- or D-natural amino acid and any non-natural amino acid; see  specification as filed for detail ed description of substitutions, R-groups  and preferred embodiments
  MOD_RES (12)..(12): Any L- or D-natural amino acid and any non-natural amino acid; see  specification as filed for detail ed description of substitutions, R-groups  and preferred embodiments
  MOD_RES (15)..(18): Any L- or D-natural or non-natural amino acid, and this range may     encompass 1 or 4 residues; see specification as filed for detailed  description of substitutions, R-groups and preferred emb
  c-term may be amidated
SLAADTPXXXFXYTXXXXEEWVKYVDDLELSA

SEQ ID NO: 816 - protein, 32 aa, Artificial Sequence
  Description of Artificial Sequence: Synthetic peptide
  MOD_RES (9)..(10): Any L- or D-natural amino acid and any non-natural amino acid; see  specification as filed for detail ed description of substitutions, R-groups  and preferred embodiments
  MOD_RES (13)..(13): Any L- or D-natural amino acid and any non-natural amino acid; see  specification as filed for detail ed description of substitutions, R-groups  and preferred embodiments
  MOD_RES (15)..(18): Any L- or D-natural or non-natural amino acid, and this range may     encompass 1 or 4 residues; see specification as filed for detailed  description of substitutions, R-groups and preferred emb
  c-term may be amidated
SLAADTPTXXFSXTXXXXEEWVKYVDDLELSA

SEQ ID NO: 817 - protein, 32 aa, Artificial Sequence
  Description of Artificial Sequence: Synthetic peptide
  MOD_RES (1)..(1): Any L- or D-natural amino acid and any non-natural amino acid; see  specification as filed for detail ed description of substitutions, R-groups  and preferred embodiments
  MOD_RES (9)..(10): Any L- or D-natural amino acid and any non-natural amino acid; see  specification as filed for detail ed description of substitutions, R-groups  and preferred embodiments
  MOD_RES (13)..(13): Any L- or D-natural amino acid and any non-natural amino acid; see  specification as filed for detail ed description of substitutions, R-groups  and preferred embodiments
  MOD_RES (15)..(18): Any L- or D-natural or non-natural amino acid, and this range may     encompass 1 or 4 residues; see specification as filed for detailed  description of substitutions, R-groups and preferred emb
  c-term may be amidated
XLAADTPTXXFSXTXXXXEEWVKYVDDLELSA

SEQ ID NO: 818 - protein, 32 aa, Artificial Sequence
  Description of Artificial Sequence: Synthetic peptide
  MOD_RES (2)..(2): Any L- or D-natural amino acid and any non-natural amino acid; see  specification as filed for detail ed description of substitutions, R-groups  and preferred embodiments
  MOD_RES (9)..(10): Any L- or D-natural amino acid and any non-natural amino acid; see  specification as filed for detail ed description of substitutions, R-groups  and preferred embodiments
  MOD_RES (13)..(13): Any L- or D-natural amino acid and any non-natural amino acid; see  specification as filed for detail ed description of substitutions, R-groups  and preferred embodiments
  MOD_RES (15)..(18): Any L- or D-natural or non-natural amino acid, and this range may     encompass 1 or 4 residues; see specification as filed for detailed  description of substitutions, R-groups and preferred emb
  c-term may be amidated
SXAADTPTXXFSXTXXXXEEWVKYVDDLELSA

SEQ ID NO: 819 - protein, 32 aa, Artificial Sequence
  Description of Artificial Sequence: Synthetic peptide
  MOD_RES (3)..(3): Any L- or D-natural amino acid and any non-natural amino acid; see  specification as filed for detail ed description of substitutions, R-groups  and preferred embodiments
  MOD_RES (9)..(10): Any L- or D-natural amino acid and any non-natural amino acid; see  specification as filed for detail ed description of substitutions, R-groups  and preferred embodiments
  MOD_RES (13)..(13): Any L- or D-natural amino acid and any non-natural amino acid; see  specification as filed for detail ed description of substitutions, R-groups  and preferred embodiments
  MOD_RES (15)..(18): Any L- or D-natural or non-natural amino acid, and this range may     encompass 1 or 4 residues; see specification as filed for detailed  description of substitutions, R-groups and preferred emb
  c-term may be amidated
SLXADTPTXXFSXTXXXXEEWVKYVDDLELSA

SEQ ID NO: 820 - protein, 32 aa, Artificial Sequence
  Description of Artificial Sequence: Synthetic peptide
  MOD_RES (4)..(4): Any L- or D-natural amino acid and any non-natural amino acid; see  specification as filed for detail ed description of substitutions, R-groups  and preferred embodiments
  MOD_RES (9)..(10): Any L- or D-natural amino acid and any non-natural amino acid; see  specification as filed for detail ed description of substitutions, R-groups  and preferred embodiments
  MOD_RES (13)..(13): Any L- or D-natural amino acid and any non-natural amino acid; see  specification as filed for detail ed description of substitutions, R-groups  and preferred embodiments
  MOD_RES (15)..(18): Any L- or D-natural or non-natural amino acid, and this range may     encompass 1 or 4 residues; see specification as filed for detailed  description of substitutions, R-groups and preferred emb
  c-term may be amidated
SLAXDTPTXXFSXTXXXXEEWVKYVDDLELSA

SEQ ID NO: 821 - protein, 32 aa, Artificial Sequence
  Description of Artificial Sequence: Synthetic peptide
  MOD_RES (5)..(5): Any L- or D-natural amino acid and any non-natural amino acid; see  specification as filed for detail ed description of substitutions, R-groups  and preferred embodiments
  MOD_RES (9)..(10): Any L- or D-natural amino acid and any non-natural amino acid; see  specification as filed for detail ed description of substitutions, R-groups  and preferred embodiments
  MOD_RES (13)..(13): Any L- or D-natural amino acid and any non-natural amino acid; see  specification as filed for detail ed description of substitutions, R-groups  and preferred embodiments
  MOD_RES (15)..(18): Any L- or D-natural or non-natural amino acid, and this range may     encompass 1 or 4 residues; see specification as filed for detailed  description of substitutions, R-groups and preferred emb
  c-term may be amidated
SLAAXTPTXXFSXTXXXXEEWVKYVDDLELSA

SEQ ID NO: 822 - protein, 32 aa, Artificial Sequence
  Description of Artificial Sequence: Synthetic peptide
  MOD_RES (6)..(6): Any L- or D-natural amino acid and any non-natural amino acid; see  specification as filed for detail ed description of substitutions, R-groups  and preferred embodiments
  MOD_RES (9)..(10): Any L- or D-natural amino acid and any non-natural amino acid; see  specification as filed for detail ed description of substitutions, R-groups  and preferred embodiments
  MOD_RES (13)..(13): Any L- or D-natural amino acid and any non-natural amino acid; see  specification as filed for detail ed description of substitutions, R-groups  and preferred embodiments
  MOD_RES (15)..(18): Any L- or D-natural or non-natural amino acid, and this range may     encompass 1 or 4 residues; see specification as filed for detailed  description of substitutions, R-groups and preferred emb
  c-term may be amidated
SLAADXPTXXFSXTXXXXEEWVKYVDDLELSA

SEQ ID NO: 823 - protein, 32 aa, Artificial Sequence
  Description of Artificial Sequence: Synthetic peptide
  MOD_RES (7)..(7): Any L- or D-natural amino acid and any non-natural amino acid; see  specification as filed for detail ed description of substitutions, R-groups  and preferred embodiments
  MOD_RES (9)..(10): Any L- or D-natural amino acid and any non-natural amino acid; see  specification as filed for detail ed description of substitutions, R-groups  and preferred embodiments
  MOD_RES (13)..(13): Any L- or D-natural amino acid and any non-natural amino acid; see  specification as filed for detail ed description of substitutions, R-groups  and preferred embodiments
  MOD_RES (15)..(18): Any L- or D-natural or non-natural amino acid, and this range may     encompass 1 or 4 residues; see specification as filed for detailed  description of substitutions, R-groups and preferred emb
  c-term may be amidated
SLAADTXTXXFSXTXXXXEEWVKYVDDLELSA

SEQ ID NO: 824 - protein, 32 aa, Artificial Sequence
  Description of Artificial Sequence: Synthetic peptide
  MOD_RES (8)..(10): Any L- or D-natural amino acid and any non-natural amino acid; see  specification as filed for detail ed description of substitutions, R-groups  and preferred embodiments
  MOD_RES (13)..(13): Any L- or D-natural amino acid and any non-natural amino acid; see  specification as filed for detail ed description of substitutions, R-groups  and preferred embodiments
  MOD_RES (15)..(18): Any L- or D-natural or non-natural amino acid, and this range may     encompass 1 or 4 residues; see specification as filed for detailed  description of substitutions, R-groups and preferred emb
  c-term may be amidated
SLAADTPXXXFSXTXXXXEEWVKYVDDLELSA

SEQ ID NO: 825 - protein, 32 aa, Artificial Sequence
  Description of Artificial Sequence: Synthetic peptide
  MOD_RES (9)..(10): Any L- or D-natural amino acid and any non-natural amino acid; see  specification as filed for detail ed description of substitutions, R-groups  and preferred embodiments
  MOD_RES (14)..(14): Any L- or D-natural amino acid and any non-natural amino acid; see  specification as filed for detail ed description of substitutions, R-groups  and preferred embodiments
  MOD_RES (15)..(18): Any L- or D-natural or non-natural amino acid, and this range may     encompass 1 or 4 residues; see specification as filed for detailed  description of substitutions, R-groups and preferred emb
  c-term may be amidated
SLAADTPTXXFSYXXXXXEEWVKYVDDLELSA

SEQ ID NO: 826 - protein, 32 aa, Artificial Sequence
  Description of Artificial Sequence: Synthetic peptide
  MOD_RES (1)..(1): Any L- or D-natural amino acid and any non-natural amino acid; see  specification as filed for detail ed description of substitutions, R-groups  and preferred embodiments
  MOD_RES (9)..(10): Any L- or D-natural amino acid and any non-natural amino acid; see  specification as filed for detail ed description of substitutions, R-groups  and preferred embodiments
  MOD_RES (14)..(14): Any L- or D-natural amino acid and any non-natural amino acid; see  specification as filed for detail ed description of substitutions, R-groups  and preferred embodiments
  MOD_RES (15)..(18): Any L- or D-natural or non-natural amino acid, and this range may     encompass 1 or 4 residues; see specification as filed for detailed  description of substitutions, R-groups and preferred emb
  c-term may be amidated
XLAADTPTXXFSYXXXXXEEWVKYVDDLELSA

SEQ ID NO: 827 - protein, 32 aa, Artificial Sequence
  Description of Artificial Sequence: Synthetic peptide
  MOD_RES (2)..(2): Any L- or D-natural amino acid and any non-natural amino acid; see  specification as filed for detail ed description of substitutions, R-groups  and preferred embodiments
  MOD_RES (9)..(10): Any L- or D-natural amino acid and any non-natural amino acid; see  specification as filed for detail ed description of substitutions, R-groups  and preferred embodiments
  MOD_RES (14)..(14): Any L- or D-natural amino acid and any non-natural amino acid; see  specification as filed for detail ed description of substitutions, R-groups  and preferred embodiments
  MOD_RES (15)..(18): Any L- or D-natural or non-natural amino acid, and this range may     encompass 1 or 4 residues; see specification as filed for detailed  description of substitutions, R-groups and preferred emb
  c-term may be amidated
SXAADTPTXXFSYXXXXXEEWVKYVDDLELSA

SEQ ID NO: 828 - protein, 32 aa, Artificial Sequence
  Description of Artificial Sequence: Synthetic peptide
  MOD_RES (3)..(3): Any L- or D-natural amino acid and any non-natural amino acid; see  specification as filed for detail ed description of substitutions, R-groups  and preferred embodiments
  MOD_RES (9)..(10): Any L- or D-natural amino acid and any non-natural amino acid; see  specification as filed for detail ed description of substitutions, R-groups  and preferred embodiments
  MOD_RES (14)..(14): Any L- or D-natural amino acid and any non-natural amino acid; see  specification as filed for detail ed description of substitutions, R-groups  and preferred embodiments
  MOD_RES (15)..(18): Any L- or D-natural or non-natural amino acid, and this range may     encompass 1 or 4 residues; see specification as filed for detailed  description of substitutions, R-groups and preferred emb
  c-term may be amidated
SLXADTPTXXFSYXXXXXEEWVKYVDDLELSA

SEQ ID NO: 829 - protein, 32 aa, Artificial Sequence
  Description of Artificial Sequence: Synthetic peptide
  MOD_RES (4)..(4): Any L- or D-natural amino acid and any non-natural amino acid; see  specification as filed for detail ed description of substitutions, R-groups  and preferred embodiments
  MOD_RES (9)..(10): Any L- or D-natural amino acid and any non-natural amino acid; see  specification as filed for detail ed description of substitutions, R-groups  and preferred embodiments
  MOD_RES (14)..(14): Any L- or D-natural amino acid and any non-natural amino acid; see  specification as filed for detail ed description of substitutions, R-groups  and preferred embodiments
  MOD_RES (15)..(18): Any L- or D-natural or non-natural amino acid, and this range may     encompass 1 or 4 residues; see specification as filed for detailed  description of substitutions, R-groups and preferred emb
  c-term may be amidated
SLAXDTPTXXFSYXXXXXEEWVKYVDDLELSA

SEQ ID NO: 830 - protein, 32 aa, Artificial Sequence
  Description of Artificial Sequence: Synthetic peptide
  MOD_RES (5)..(5): Any L- or D-natural amino acid and any non-natural amino acid; see  specification as filed for detail ed description of substitutions, R-groups  and preferred embodiments
  MOD_RES (9)..(10): Any L- or D-natural amino acid and any non-natural amino acid; see  specification as filed for detail ed description of substitutions, R-groups  and preferred embodiments
  MOD_RES (14)..(14): Any L- or D-natural amino acid and any non-natural amino acid; see  specification as filed for detail ed description of substitutions, R-groups  and preferred embodiments
  MOD_RES (15)..(18): Any L- or D-natural or non-natural amino acid, and this range may     encompass 1 or 4 residues; see specification as filed for detailed  description of substitutions, R-groups and preferred emb
  c-term may be amidated
SLAAXTPTXXFSYXXXXXEEWVKYVDDLELSA

SEQ ID NO: 831 - protein, 32 aa, Artificial Sequence
  Description of Artificial Sequence: Synthetic peptide
  MOD_RES (6)..(6): Any L- or D-natural amino acid and any non-natural amino acid; see  specification as filed for detail ed description of substitutions, R-groups  and preferred embodiments
  MOD_RES (9)..(10): Any L- or D-natural amino acid and any non-natural amino acid; see  specification as filed for detail ed description of substitutions, R-groups  and preferred embodiments
  MOD_RES (14)..(14): Any L- or D-natural amino acid and any non-natural amino acid; see  specification as filed for detail ed description of substitutions, R-groups  and preferred embodiments
  MOD_RES (15)..(18): Any L- or D-natural or non-natural amino acid, and this range may     encompass 1 or 4 residues; see specification as filed for detailed  description of substitutions, R-groups and preferred emb
  c-term may be amidated
SLAADXPTXXFSYXXXXXEEWVKYVDDLELSA

SEQ ID NO: 832 - protein, 32 aa, Artificial Sequence
  Description of Artificial Sequence: Synthetic peptide
  MOD_RES (7)..(7): Any L- or D-natural amino acid and any non-natural amino acid; see  specification as filed for detail ed description of substitutions, R-groups  and preferred embodiments
  MOD_RES (9)..(10): Any L- or D-natural amino acid and any non-natural amino acid; see  specification as filed for detail ed description of substitutions, R-groups  and preferred embodiments
  MOD_RES (14)..(14): Any L- or D-natural amino acid and any non-natural amino acid; see  specification as filed for detail ed description of substitutions, R-groups  and preferred embodiments
  MOD_RES (15)..(18): Any L- or D-natural or non-natural amino acid, and this range may     encompass 1 or 4 residues; see specification as filed for detailed  description of substitutions, R-groups and preferred emb
  c-term may be amidated
SLAADTXTXXFSYXXXXXEEWVKYVDDLELSA

SEQ ID NO: 833 - protein, 32 aa, Artificial Sequence
  Description of Artificial Sequence: Synthetic peptide
  MOD_RES (8)..(10): Any L- or D-natural amino acid and any non-natural amino acid; see  specification as filed for detail ed description of substitutions, R-groups  and preferred embodiments
  MOD_RES (14)..(14): Any L- or D-natural amino acid and any non-natural amino acid; see  specification as filed for detail ed description of substitutions, R-groups  and preferred embodiments
  MOD_RES (15)..(18): Any L- or D-natural or non-natural amino acid, and this range may     encompass 1 or 4 residues; see specification as filed for detailed  description of substitutions, R-groups and preferred emb
  c-term may be amidated
SLAADTPXXXFSYXXXXXEEWVKYVDDLELSA

SEQ ID NO: 834 - protein, 23 aa, Artificial Sequence
  Description of Artificial Sequence: Synthetic peptide
  c-term may be amidated
ACFSYTSRQIPQNADYFETSSQC

SEQ ID NO: 835 - protein, 23 aa, Artificial Sequence
  Description of Artificial Sequence: Synthetic peptide
  c-term may be amidated
AKFSYTSRQIPQNADYFETSSQE

SEQ ID NO: 836 - protein, 32 aa, Artificial Sequence; identical to SEQ ID NO: 788
  Description of Artificial Sequence: Synthetic peptide
  MOD_RES (15)..(18): Any L- or D-natural or non-natural amino acid, and this range may     encompass 1 or 4 residues; see specification as filed for detailed  description of substitutions, R-groups and preferred emb
  c-term may be amidated

SEQ ID NO: 837 - protein, 32 aa, Artificial Sequence; identical to SEQ ID NO: 789
  Description of Artificial Sequence: Synthetic peptide
  MOD_RES (9)..(10): Any L- or D-natural amino acid and any non-natural amino acid; see  specification as filed for detail ed description of substitutions, R-groups  and preferred embodiments
  MOD_RES (15)..(18): Any L- or D-natural or non-natural amino acid, and this range may     encompass 1 or 4 residues; see specification as filed for detailed  description of substitutions, R-groups and preferred emb
  c-term may be amidated

SEQ ID NO: 838 - protein, 32 aa, Artificial Sequence; identical to SEQ ID NO: 790
  Description of Artificial Sequence: Synthetic peptide
  MOD_RES (1)..(1): Any L- or D-natural amino acid and any non-natural amino acid; see  specification as filed for detail ed description of substitutions, R-groups  and preferred embodiments
  MOD_RES (9)..(10): Any L- or D-natural amino acid and any non-natural amino acid; see  specification as filed for detail ed description of substitutions, R-groups  and preferred embodiments
  MOD_RES (15)..(18): Any L- or D-natural or non-natural amino acid, and this range may     encompass 1 or 4 residues; see specification as filed for detailed  description of substitutions, R-groups and preferred emb
  c-term may be amidated

SEQ ID NO: 839 - protein, 32 aa, Artificial Sequence; identical to SEQ ID NO: 791
  Description of Artificial Sequence: Synthetic peptide
  MOD_RES (2)..(2): Any L- or D-natural amino acid and any non-natural amino acid; see  specification as filed for detail ed description of substitutions, R-groups  and preferred embodiments
  MOD_RES (9)..(10): Any L- or D-natural amino acid and any non-natural amino acid; see  specification as filed for detail ed description of substitutions, R-groups  and preferred embodiments
  MOD_RES (15)..(18): Any L- or D-natural or non-natural amino acid, and this range may     encompass 1 or 4 residues; see specification as filed for detailed  description of substitutions, R-groups and preferred emb
  c-term may be amidated

SEQ ID NO: 840 - protein, 32 aa, Artificial Sequence; identical to SEQ ID NO: 792
  Description of Artificial Sequence: Synthetic peptide
  MOD_RES (3)..(3): Any L- or D-natural amino acid and any non-natural amino acid; see  specification as filed for detail ed description of substitutions, R-groups  and preferred embodiments
  MOD_RES (9)..(10): Any L- or D-natural amino acid and any non-natural amino acid; see  specification as filed for detail ed description of substitutions, R-groups  and preferred embodiments
  MOD_RES (15)..(18): Any L- or D-natural or non-natural amino acid, and this range may     encompass 1 or 4 residues; see specification as filed for detailed  description of substitutions, R-groups and preferred emb
  c-term may be amidated

SEQ ID NO: 841 - protein, 32 aa, Artificial Sequence; identical to SEQ ID NO: 793
  Description of Artificial Sequence: Synthetic peptide
  MOD_RES (4)..(4): Any L- or D-natural amino acid and any non-natural amino acid; see  specification as filed for detail ed description of substitutions, R-groups  and preferred embodiments
  MOD_RES (9)..(10): Any L- or D-natural amino acid and any non-natural amino acid; see  specification as filed for detail ed description of substitutions, R-groups  and preferred embodiments
  MOD_RES (15)..(18): Any L- or D-natural or non-natural amino acid, and this range may     encompass 1 or 4 residues; see specification as filed for detailed  description of substitutions, R-groups and preferred emb
  c-term may be amidated

SEQ ID NO: 842 - protein, 32 aa, Artificial Sequence; identical to SEQ ID NO: 794
  Description of Artificial Sequence: Synthetic peptide
  MOD_RES (5)..(5): Any L- or D-natural amino acid and any non-natural amino acid; see  specification as filed for detail ed description of substitutions, R-groups  and preferred embodiments
  MOD_RES (9)..(10): Any L- or D-natural amino acid and any non-natural amino acid; see  specification as filed for detail ed description of substitutions, R-groups  and preferred embodiments
  MOD_RES (15)..(18): Any L- or D-natural or non-natural amino acid, and this range may     encompass 1 or 4 residues; see specification as filed for detailed  description of substitutions, R-groups and preferred emb
  c-term may be amidated

SEQ ID NO: 843 - protein, 32 aa, Artificial Sequence; identical to SEQ ID NO: 795
  Description of Artificial Sequence: Synthetic peptide
  MOD_RES (6)..(6): Any L- or D-natural amino acid and any non-natural amino acid; see  specification as filed for detail ed description of substitutions, R-groups  and preferred embodiments
  MOD_RES (9)..(10): Any L- or D-natural amino acid and any non-natural amino acid; see  specification as filed for detail ed description of substitutions, R-groups  and preferred embodiments
  MOD_RES (15)..(18): Any L- or D-natural or non-natural amino acid, and this range may     encompass 1 or 4 residues; see specification as filed for detailed  description of substitutions, R-groups and preferred emb
  c-term may be amidated

SEQ ID NO: 844 - protein, 32 aa, Artificial Sequence; identical to SEQ ID NO: 796
  Description of Artificial Sequence: Synthetic peptide
  MOD_RES (7)..(7): Any L- or D-natural amino acid and any non-natural amino acid; see  specification as filed for detail ed description of substitutions, R-groups  and preferred embodiments
  MOD_RES (9)..(10): Any L- or D-natural amino acid and any non-natural amino acid; see  specification as filed for detail ed description of substitutions, R-groups  and preferred embodiments
  MOD_RES (15)..(18): Any L- or D-natural or non-natural amino acid, and this range may     encompass 1 or 4 residues; see specification as filed for detailed  description of substitutions, R-groups and preferred emb
  c-term may be amidated

SEQ ID NO: 845 - protein, 32 aa, Artificial Sequence; identical to SEQ ID NO: 797
  Description of Artificial Sequence: Synthetic peptide
  MOD_RES (8)..(10): Any L- or D-natural amino acid and any non-natural amino acid; see  specification as filed for detail ed description of substitutions, R-groups  and preferred embodiments
  MOD_RES (15)..(18): Any L- or D-natural or non-natural amino acid, and this range may     encompass 1 or 4 residues; see specification as filed for detailed  description of substitutions, R-groups and preferred emb
  c-term may be amidated

SEQ ID NO: 846 - protein, 32 aa, Artificial Sequence; identical to SEQ ID NO: 798
  Description of Artificial Sequence: Synthetic peptide
  MOD_RES (9)..(11): Any L- or D-natural amino acid and any non-natural amino acid; see  specification as filed for detail ed description of substitutions, R-groups  and preferred embodiments
  MOD_RES (15)..(18): Any L- or D-natural or non-natural amino acid, and this range may     encompass 1 or 4 residues; see specification as filed for detailed  description of substitutions, R-groups and preferred emb
  c-term may be amidated

SEQ ID NO: 847 - protein, 32 aa, Artificial Sequence; identical to SEQ ID NO: 799
  Description of Artificial Sequence: Synthetic peptide
  MOD_RES (1)..(1): Any L- or D-natural amino acid and any non-natural amino acid; see  specification as filed for detail ed description of substitutions, R-groups  and preferred embodiments
  MOD_RES (9)..(11): Any L- or D-natural amino acid and any non-natural amino acid; see  specification as filed for detail ed description of substitutions, R-groups  and preferred embodiments
  MOD_RES (15)..(18): Any L- or D-natural or non-natural amino acid, and this range may     encompass 1 or 4 residues; see specification as filed for detailed  description of substitutions, R-groups and preferred emb
  c-term may be amidated

SEQ ID NO: 848 - protein, 32 aa, Artificial Sequence; identical to SEQ ID NO: 800
  Description of Artificial Sequence: Synthetic peptide
  MOD_RES (2)..(2): Any L- or D-natural amino acid and any non-natural amino acid; see  specification as filed for detail ed description of substitutions, R-groups  and preferred embodiments
  MOD_RES (9)..(11): Any L- or D-natural amino acid and any non-natural amino acid; see  specification as filed for detail ed description of substitutions, R-groups  and preferred embodiments
  MOD_RES (15)..(18): Any L- or D-natural or non-natural amino acid, and this range may     encompass 1 or 4 residues; see specification as filed for detailed  description of substitutions, R-groups and preferred emb
  c-term may be amidated

SEQ ID NO: 849 - protein, 32 aa, Artificial Sequence; identical to SEQ ID NO: 801
  Description of Artificial Sequence: Synthetic peptide
  MOD_RES (3)..(3): Any L- or D-natural amino acid and any non-natural amino acid; see  specification as filed for detail ed description of substitutions, R-groups  and preferred embodiments
  MOD_RES (9)..(11): Any L- or D-natural amino acid and any non-natural amino acid; see  specification as filed for detail ed description of substitutions, R-groups  and preferred embodiments
  MOD_RES (15)..(18): Any L- or D-natural or non-natural amino acid, and this range may     encompass 1 or 4 residues; see specification as filed for detailed  description of substitutions, R-groups and preferred emb
  c-term may be amidated

SEQ ID NO: 850 - protein, 32 aa, Artificial Sequence; identical to SEQ ID NO: 802
  Description of Artificial Sequence: Synthetic peptide
  MOD_RES (4)..(4): Any L- or D-natural amino acid and any non-natural amino acid; see  specification as filed for detail ed description of substitutions, R-groups  and preferred embodiments
  MOD_RES (9)..(11): Any L- or D-natural amino acid and any non-natural amino acid; see  specification as filed for detail ed description of substitutions, R-groups  and preferred embodiments
  MOD_RES (15)..(18): Any L- or D-natural or non-natural amino acid, and this range may     encompass 1 or 4 residues; see specification as filed for detailed  description of substitutions, R-groups and preferred emb
  c-term may be amidated

SEQ ID NO: 851 - protein, 32 aa, Artificial Sequence; identical to SEQ ID NO: 803
  Description of Artificial Sequence: Synthetic peptide
  MOD_RES (5)..(5): Any L- or D-natural amino acid and any non-natural amino acid; see  specification as filed for detail ed description of substitutions, R-groups  and preferred embodiments
  MOD_RES (9)..(11): Any L- or D-natural amino acid and any non-natural amino acid; see  specification as filed for detail ed description of substitutions, R-groups  and preferred embodiments
  MOD_RES (15)..(18): Any L- or D-natural or non-natural amino acid, and this range may     encompass 1 or 4 residues; see specification as filed for detailed  description of substitutions, R-groups and preferred emb
  c-term may be amidated

SEQ ID NO: 852 - protein, 32 aa, Artificial Sequence; identical to SEQ ID NO: 804
  Description of Artificial Sequence: Synthetic peptide
  MOD_RES (6)..(6): Any L- or D-natural amino acid and any non-natural amino acid; see  specification as filed for detail ed description of substitutions, R-groups  and preferred embodiments
  MOD_RES (9)..(11): Any L- or D-natural amino acid and any non-natural amino acid; see  specification as filed for detail ed description of substitutions, R-groups  and preferred embodiments
  MOD_RES (15)..(18): Any L- or D-natural or non-natural amino acid, and this range may     encompass 1 or 4 residues; see specification as filed for detailed  description of substitutions, R-groups and preferred emb
  c-term may be amidated

SEQ ID NO: 853 - protein, 32 aa, Artificial Sequence; identical to SEQ ID NO: 805
  Description of Artificial Sequence: Synthetic peptide
  MOD_RES (7)..(7): Any L- or D-natural amino acid and any non-natural amino acid; see  specification as filed for detail ed description of substitutions, R-groups  and preferred embodiments
  MOD_RES (9)..(11): Any L- or D-natural amino acid and any non-natural amino acid; see  specification as filed for detail ed description of substitutions, R-groups  and preferred embodiments
  MOD_RES (15)..(18): Any L- or D-natural or non-natural amino acid, and this range may     encompass 1 or 4 residues; see specification as filed for detailed  description of substitutions, R-groups and preferred emb
  c-term may be amidated

SEQ ID NO: 854 - protein, 32 aa, Artificial Sequence; identical to SEQ ID NO: 806
  Description of Artificial Sequence: Synthetic peptide
  MOD_RES (8)..(11): Any L- or D-natural amino acid and any non-natural amino acid; see  specification as filed for detail ed description of substitutions, R-groups  and preferred embodiments
  MOD_RES (15)..(18): Any L- or D-natural or non-natural amino acid, and this range may     encompass 1 or 4 residues; see specification as filed for detailed  description of substitutions, R-groups and preferred emb
  c-term may be amidated

SEQ ID NO: 855 - protein, 32 aa, Artificial Sequence; identical to SEQ ID NO: 807
  Description of Artificial Sequence: Synthetic peptide
  MOD_RES (9)..(10): Any L- or D-natural amino acid and any non-natural amino acid; see  specification as filed for detail ed description of substitutions, R-groups  and preferred embodiments
  MOD_RES (12)..(12): Any L- or D-natural amino acid and any non-natural amino acid; see  specification as filed for detail ed description of substitutions, R-groups  and preferred embodiments
  MOD_RES (15)..(18): Any L- or D-natural or non-natural amino acid, and this range may     encompass 1 or 4 residues; see specification as filed for detailed  description of substitutions, R-groups and preferred emb
  c-term may be amidated

SEQ ID NO: 856 - protein, 32 aa, Artificial Sequence; identical to SEQ ID NO: 808
  Description of Artificial Sequence: Synthetic peptide
  MOD_RES (1)..(1): Any L- or D-natural amino acid and any non-natural amino acid; see  specification as filed for detail ed description of substitutions, R-groups  and preferred embodiments
  MOD_RES (9)..(10): Any L- or D-natural amino acid and any non-natural amino acid; see  specification as filed for detail ed description of substitutions, R-groups  and preferred embodiments
  MOD_RES (12)..(12): Any L- or D-natural amino acid and any non-natural amino acid; see  specification as filed for detail ed description of substitutions, R-groups  and preferred embodiments
  MOD_RES (15)..(18): Any L- or D-natural or non-natural amino acid, and this range may     encompass 1 or 4 residues; see specification as filed for detailed  description of substitutions, R-groups and preferred emb
  c-term may be amidated

SEQ ID NO: 857 - protein, 32 aa, Artificial Sequence; identical to SEQ ID NO: 809
  Description of Artificial Sequence: Synthetic peptide
  MOD_RES (2)..(2): Any L- or D-natural amino acid and any non-natural amino acid; see  specification as filed for detail ed description of substitutions, R-groups  and preferred embodiments
  MOD_RES (9)..(10): Any L- or D-natural amino acid and any non-natural amino acid; see  specification as filed for detail ed description of substitutions, R-groups  and preferred embodiments
  MOD_RES (12)..(12): Any L- or D-natural amino acid and any non-natural amino acid; see  specification as filed for detail ed description of substitutions, R-groups  and preferred embodiments
  MOD_RES (15)..(18): Any L- or D-natural or non-natural amino acid, and this range may     encompass 1 or 4 residues; see specification as filed for detailed  description of substitutions, R-groups and preferred emb
  c-term may be amidated

SEQ ID NO: 858 - protein, 32 aa, Artificial Sequence; identical to SEQ ID NO: 810
  Description of Artificial Sequence: Synthetic peptide
  MOD_RES (3)..(3): Any L- or D-natural amino acid and any non-natural amino acid; see  specification as filed for detail ed description of substitutions, R-groups  and preferred embodiments
  MOD_RES (9)..(10): Any L- or D-natural amino acid and any non-natural amino acid; see  specification as filed for detail ed description of substitutions, R-groups  and preferred embodiments
  MOD_RES (12)..(12): Any L- or D-natural amino acid and any non-natural amino acid; see  specification as filed for detail ed description of substitutions, R-groups  and preferred embodiments
  MOD_RES (15)..(18): Any L- or D-natural or non-natural amino acid, and this range may     encompass 1 or 4 residues; see specification as filed for detailed  description of substitutions, R-groups and preferred emb
  c-term may be amidated

SEQ ID NO: 859 - protein, 32 aa, Artificial Sequence; identical to SEQ ID NO: 811
  Description of Artificial Sequence: Synthetic peptide
  MOD_RES (4)..(4): Any L- or D-natural amino acid and any non-natural amino acid; see  specification as filed for detail ed description of substitutions, R-groups  and preferred embodiments
  MOD_RES (9)..(10): Any L- or D-natural amino acid and any non-natural amino acid; see  specification as filed for detail ed description of substitutions, R-groups  and preferred embodiments
  MOD_RES (12)..(12): Any L- or D-natural amino acid and any non-natural amino acid; see  specification as filed for detail ed description of substitutions, R-groups  and preferred embodiments
  MOD_RES (15)..(18): Any L- or D-natural or non-natural amino acid, and this range may     encompass 1 or 4 residues; see specification as filed for detailed  description of substitutions, R-groups and preferred emb
  c-term may be amidated

SEQ ID NO: 860 - protein, 32 aa, Artificial Sequence; identical to SEQ ID NO: 812
  Description of Artificial Sequence: Synthetic peptide
  MOD_RES (5)..(5): Any L- or D-natural amino acid and any non-natural amino acid; see  specification as filed for detail ed description of substitutions, R-groups  and preferred embodiments
  MOD_RES (9)..(10): Any L- or D-natural amino acid and any non-natural amino acid; see  specification as filed for detail ed description of substitutions, R-groups  and preferred embodiments
  MOD_RES (12)..(12): Any L- or D-natural amino acid and any non-natural amino acid; see  specification as filed for detail ed description of substitutions, R-groups  and preferred embodiments
  MOD_RES (15)..(18): Any L- or D-natural or non-natural amino acid, and this range may     encompass 1 or 4 residues; see specification as filed for detailed  description of substitutions, R-groups and preferred emb
  c-term may be amidated

SEQ ID NO: 861 - protein, 32 aa, Artificial Sequence; identical to SEQ ID NO: 813
  Description of Artificial Sequence: Synthetic peptide
  MOD_RES (6)..(6): Any L- or D-natural amino acid and any non-natural amino acid; see  specification as filed for detail ed description of substitutions, R-groups  and preferred embodiments
  MOD_RES (9)..(10): Any L- or D-natural amino acid and any non-natural amino acid; see  specification as filed for detail ed description of substitutions, R-groups  and preferred embodiments
  MOD_RES (12)..(12): Any L- or D-natural amino acid and any non-natural amino acid; see  specification as filed for detail ed description of substitutions, R-groups  and preferred embodiments
  MOD_RES (15)..(18): Any L- or D-natural or non-natural amino acid, and this range may     encompass 1 or 4 residues; see specification as filed for detailed  description of substitutions, R-groups and preferred emb
  c-term may be amidated

SEQ ID NO: 862 - protein, 32 aa, Artificial Sequence; identical to SEQ ID NO: 814
  Description of Artificial Sequence: Synthetic peptide
  MOD_RES (7)..(7): Any L- or D-natural amino acid and any non-natural amino acid; see  specification as filed for detail ed description of substitutions, R-groups  and preferred embodiments
  MOD_RES (9)..(10): Any L- or D-natural amino acid and any non-natural amino acid; see  specification as filed for detail ed description of substitutions, R-groups  and preferred embodiments
  MOD_RES (12)..(12): Any L- or D-natural amino acid and any non-natural amino acid; see  specification as filed for detail ed description of substitutions, R-groups  and preferred embodiments
  MOD_RES (15)..(18): Any L- or D-natural or non-natural amino acid, and this range may     encompass 1 or 4 residues; see specification as filed for detailed  description of substitutions, R-groups and preferred emb
  c-term may be amidated

SEQ ID NO: 863 - protein, 32 aa, Artificial Sequence; identical to SEQ ID NO: 815
  Description of Artificial Sequence: Synthetic peptide
  MOD_RES (8)..(10): Any L- or D-natural amino acid and any non-natural amino acid; see  specification as filed for detail ed description of substitutions, R-groups  and preferred embodiments
  MOD_RES (12)..(12): Any L- or D-natural amino acid and any non-natural amino acid; see  specification as filed for detail ed description of substitutions, R-groups  and preferred embodiments
  MOD_RES (15)..(18): Any L- or D-natural or non-natural amino acid, and this range may     encompass 1 or 4 residues; see specification as filed for detailed  description of substitutions, R-groups and preferred emb
  c-term may be amidated

SEQ ID NO: 864 - protein, 32 aa, Artificial Sequence; identical to SEQ ID NO: 816
  Description of Artificial Sequence: Synthetic peptide
  MOD_RES (9)..(10): Any L- or D-natural amino acid and any non-natural amino acid; see  specification as filed for detail ed description of substitutions, R-groups  and preferred embodiments
  MOD_RES (13)..(13): Any L- or D-natural amino acid and any non-natural amino acid; see  specification as filed for detail ed description of substitutions, R-groups  and preferred embodiments
  MOD_RES (15)..(18): Any L- or D-natural or non-natural amino acid, and this range may     encompass 1 or 4 residues; see specification as filed for detailed  description of substitutions, R-groups and preferred emb
  c-term may be amidated

SEQ ID NO: 865 - protein, 32 aa, Artificial Sequence; identical to SEQ ID NO: 817
  Description of Artificial Sequence: Synthetic peptide
  MOD_RES (1)..(1): Any L- or D-natural amino acid and any non-natural amino acid; see  specification as filed for detail ed description of substitutions, R-groups  and preferred embodiments
  MOD_RES (9)..(10): Any L- or D-natural amino acid and any non-natural amino acid; see  specification as filed for detail ed description of substitutions, R-groups  and preferred embodiments
  MOD_RES (13)..(13): Any L- or D-natural amino acid and any non-natural amino acid; see  specification as filed for detail ed description of substitutions, R-groups  and preferred embodiments
  MOD_RES (15)..(18): Any L- or D-natural or non-natural amino acid, and this range may     encompass 1 or 4 residues; see specification as filed for detailed  description of substitutions, R-groups and preferred emb
  c-term may be amidated

SEQ ID NO: 866 - protein, 32 aa, Artificial Sequence; identical to SEQ ID NO: 818
  Description of Artificial Sequence: Synthetic peptide
  MOD_RES (2)..(2): Any L- or D-natural amino acid and any non-natural amino acid; see  specification as filed for detail ed description of substitutions, R-groups  and preferred embodiments
  MOD_RES (9)..(10): Any L- or D-natural amino acid and any non-natural amino acid; see  specification as filed for detail ed description of substitutions, R-groups  and preferred embodiments
  MOD_RES (13)..(13): Any L- or D-natural amino acid and any non-natural amino acid; see  specification as filed for detail ed description of substitutions, R-groups  and preferred embodiments
  MOD_RES (15)..(18): Any L- or D-natural or non-natural amino acid, and this range may     encompass 1 or 4 residues; see specification as filed for detailed  description of substitutions, R-groups and preferred emb
  c-term may be amidated

SEQ ID NO: 867 - protein, 32 aa, Artificial Sequence; identical to SEQ ID NO: 819
  Description of Artificial Sequence: Synthetic peptide
  MOD_RES (3)..(3): Any L- or D-natural amino acid and any non-natural amino acid; see  specification as filed for detail ed description of substitutions, R-groups  and preferred embodiments
  MOD_RES (9)..(10): Any L- or D-natural amino acid and any non-natural amino acid; see  specification as filed for detail ed description of substitutions, R-groups  and preferred embodiments
  MOD_RES (13)..(13): Any L- or D-natural amino acid and any non-natural amino acid; see  specification as filed for detail ed description of substitutions, R-groups  and preferred embodiments
  MOD_RES (15)..(18): Any L- or D-natural or non-natural amino acid, and this range may     encompass 1 or 4 residues; see specification as filed for detailed  description of substitutions, R-groups and preferred emb
  c-term may be amidated

SEQ ID NO: 868 - protein, 32 aa, Artificial Sequence; identical to SEQ ID NO: 820
  Description of Artificial Sequence: Synthetic peptide
  MOD_RES (4)..(4): Any L- or D-natural amino acid and any non-natural amino acid; see  specification as filed for detail ed description of substitutions, R-groups  and preferred embodiments
  MOD_RES (9)..(10): Any L- or D-natural amino acid and any non-natural amino acid; see  specification as filed for detail ed description of substitutions, R-groups  and preferred embodiments
  MOD_RES (13)..(13): Any L- or D-natural amino acid and any non-natural amino acid; see  specification as filed for detail ed description of substitutions, R-groups  and preferred embodiments
  MOD_RES (15)..(18): Any L- or D-natural or non-natural amino acid, and this range may     encompass 1 or 4 residues; see specification as filed for detailed  description of substitutions, R-groups and preferred emb
  c-term may be amidated

SEQ ID NO: 869 - protein, 32 aa, Artificial Sequence; identical to SEQ ID NO: 821
  Description of Artificial Sequence: Synthetic peptide
  MOD_RES (5)..(5): Any L- or D-natural amino acid and any non-natural amino acid; see  specification as filed for detail ed description of substitutions, R-groups  and preferred embodiments
  MOD_RES (9)..(10): Any L- or D-natural amino acid and any non-natural amino acid; see  specification as filed for detail ed description of substitutions, R-groups  and preferred embodiments
  MOD_RES (13)..(13): Any L- or D-natural amino acid and any non-natural amino acid; see  specification as filed for detail ed description of substitutions, R-groups  and preferred embodiments
  MOD_RES (15)..(18): Any L- or D-natural or non-natural amino acid, and this range may     encompass 1 or 4 residues; see specification as filed for detailed  description of substitutions, R-groups and preferred emb
  c-term may be amidated

SEQ ID NO: 870 - protein, 32 aa, Artificial Sequence; identical to SEQ ID NO: 822
  Description of Artificial Sequence: Synthetic peptide
  MOD_RES (6)..(6): Any L- or D-natural amino acid and any non-natural amino acid; see  specification as filed for detail ed description of substitutions, R-groups  and preferred embodiments
  MOD_RES (9)..(10): Any L- or D-natural amino acid and any non-natural amino acid; see  specification as filed for detail ed description of substitutions, R-groups  and preferred embodiments
  MOD_RES (13)..(13): Any L- or D-natural amino acid and any non-natural amino acid; see  specification as filed for detail ed description of substitutions, R-groups  and preferred embodiments
  MOD_RES (15)..(18): Any L- or D-natural or non-natural amino acid, and this range may     encompass 1 or 4 residues; see specification as filed for detailed  description of substitutions, R-groups and preferred emb
  c-term may be amidated

SEQ ID NO: 871 - protein, 32 aa, Artificial Sequence; identical to SEQ ID NO: 823
  Description of Artificial Sequence: Synthetic peptide
  MOD_RES (7)..(7): Any L- or D-natural amino acid and any non-natural amino acid; see  specification as filed for detail ed description of substitutions, R-groups  and preferred embodiments
  MOD_RES (9)..(10): Any L- or D-natural amino acid and any non-natural amino acid; see  specification as filed for detail ed description of substitutions, R-groups  and preferred embodiments
  MOD_RES (13)..(13): Any L- or D-natural amino acid and any non-natural amino acid; see  specification as filed for detail ed description of substitutions, R-groups  and preferred embodiments
  MOD_RES (15)..(18): Any L- or D-natural or non-natural amino acid, and this range may     encompass 1 or 4 residues; see specification as filed for detailed  description of substitutions, R-groups and preferred emb
  c-term may be amidated

SEQ ID NO: 872 - protein, 32 aa, Artificial Sequence; identical to SEQ ID NO: 824
  Description of Artificial Sequence: Synthetic peptide
  MOD_RES (8)..(10): Any L- or D-natural amino acid and any non-natural amino acid; see  specification as filed for detail ed description of substitutions, R-groups  and preferred embodiments
  MOD_RES (13)..(13): Any L- or D-natural amino acid and any non-natural amino acid; see  specification as filed for detail ed description of substitutions, R-groups  and preferred embodiments
  MOD_RES (15)..(18): Any L- or D-natural or non-natural amino acid, and this range may     encompass 1 or 4 residues; see specification as filed for detailed  description of substitutions, R-groups and preferred emb
  c-term may be amidated

SEQ ID NO: 873 - protein, 32 aa, Artificial Sequence; identical to SEQ ID NO: 825
  Description of Artificial Sequence: Synthetic peptide
  MOD_RES (9)..(10): Any L- or D-natural amino acid and any non-natural amino acid; see  specification as filed for detail ed description of substitutions, R-groups  and preferred embodiments
  MOD_RES (14)..(14): Any L- or D-natural amino acid and any non-natural amino acid; see  specification as filed for detail ed description of substitutions, R-groups  and preferred embodiments
  MOD_RES (15)..(18): Any L- or D-natural or non-natural amino acid, and this range may     encompass 1 or 4 residues; see specification as filed for detailed  description of substitutions, R-groups and preferred emb
  c-term may be amidated

SEQ ID NO: 874 - protein, 32 aa, Artificial Sequence; identical to SEQ ID NO: 826
  Description of Artificial Sequence: Synthetic peptide
  MOD_RES (1)..(1): Any L- or D-natural amino acid and any non-natural amino acid; see  specification as filed for detail ed description of substitutions, R-groups  and preferred embodiments
  MOD_RES (9)..(10): Any L- or D-natural amino acid and any non-natural amino acid; see  specification as filed for detail ed description of substitutions, R-groups  and preferred embodiments
  MOD_RES (14)..(14): Any L- or D-natural amino acid and any non-natural amino acid; see  specification as filed for detail ed description of substitutions, R-groups  and preferred embodiments
  MOD_RES (15)..(18): Any L- or D-natural or non-natural amino acid, and this range may     encompass 1 or 4 residues; see specification as filed for detailed  description of substitutions, R-groups and preferred emb
  c-term may be amidated

SEQ ID NO: 875 - protein, 32 aa, Artificial Sequence; identical to SEQ ID NO: 827
  Description of Artificial Sequence: Synthetic peptide
  MOD_RES (2)..(2): Any L- or D-natural amino acid and any non-natural amino acid; see  specification as filed for detail ed description of substitutions, R-groups  and preferred embodiments
  MOD_RES (9)..(10): Any L- or D-natural amino acid and any non-natural amino acid; see  specification as filed for detail ed description of substitutions, R-groups  and preferred embodiments
  MOD_RES (14)..(14): Any L- or D-natural amino acid and any non-natural amino acid; see  specification as filed for detail ed description of substitutions, R-groups  and preferred embodiments
  MOD_RES (15)..(18): Any L- or D-natural or non-natural amino acid, and this range may     encompass 1 or 4 residues; see specification as filed for detailed  description of substitutions, R-groups and preferred emb
  c-term may be amidated

SEQ ID NO: 876 - protein, 32 aa, Artificial Sequence; identical to SEQ ID NO: 828
  Description of Artificial Sequence: Synthetic peptide
  MOD_RES (3)..(3): Any L- or D-natural amino acid and any non-natural amino acid; see  specification as filed for detail ed description of substitutions, R-groups  and preferred embodiments
  MOD_RES (9)..(10): Any L- or D-natural amino acid and any non-natural amino acid; see  specification as filed for detail ed description of substitutions, R-groups  and preferred embodiments
  MOD_RES (14)..(14): Any L- or D-natural amino acid and any non-natural amino acid; see  specification as filed for detail ed description of substitutions, R-groups  and preferred embodiments
  MOD_RES (15)..(18): Any L- or D-natural or non-natural amino acid, and this range may     encompass 1 or 4 residues; see specification as filed for detailed  description of substitutions, R-groups and preferred emb
  c-term may be amidated

SEQ ID NO: 877 - protein, 32 aa, Artificial Sequence; identical to SEQ ID NO: 829
  Description of Artificial Sequence: Synthetic peptide
  MOD_RES (4)..(4): Any L- or D-natural amino acid and any non-natural amino acid; see  specification as filed for detail ed description of substitutions, R-groups  and preferred embodiments
  MOD_RES (9)..(10): Any L- or D-natural amino acid and any non-natural amino acid; see  specification as filed for detail ed description of substitutions, R-groups  and preferred embodiments
  MOD_RES (14)..(14): Any L- or D-natural amino acid and any non-natural amino acid; see  specification as filed for detail ed description of substitutions, R-groups  and preferred embodiments
  MOD_RES (15)..(18): Any L- or D-natural or non-natural amino acid, and this range may     encompass 1 or 4 residues; see specification as filed for detailed  description of substitutions, R-groups and preferred emb
  c-term may be amidated

SEQ ID NO: 878 - protein, 32 aa, Artificial Sequence; identical to SEQ ID NO: 830
  Description of Artificial Sequence: Synthetic peptide
  MOD_RES (5)..(5): Any L- or D-natural amino acid and any non-natural amino acid; see  specification as filed for detail ed description of substitutions, R-groups  and preferred embodiments
  MOD_RES (9)..(10): Any L- or D-natural amino acid and any non-natural amino acid; see  specification as filed for detail ed description of substitutions, R-groups  and preferred embodiments
  MOD_RES (14)..(14): Any L- or D-natural amino acid and any non-natural amino acid; see  specification as filed for detail ed description of substitutions, R-groups  and preferred embodiments
  MOD_RES (15)..(18): Any L- or D-natural or non-natural amino acid, and this range may     encompass 1 or 4 residues; see specification as filed for detailed  description of substitutions, R-groups and preferred emb
  c-term may be amidated

SEQ ID NO: 879 - protein, 32 aa, Artificial Sequence; identical to SEQ ID NO: 831
  Description of Artificial Sequence: Synthetic peptide
  MOD_RES (6)..(6): Any L- or D-natural amino acid and any non-natural amino acid; see  specification as filed for detail ed description of substitutions, R-groups  and preferred embodiments
  MOD_RES (9)..(10): Any L- or D-natural amino acid and any non-natural amino acid; see  specification as filed for detail ed description of substitutions, R-groups  and preferred embodiments
  MOD_RES (14)..(14): Any L- or D-natural amino acid and any non-natural amino acid; see  specification as filed for detail ed description of substitutions, R-groups  and preferred embodiments
  MOD_RES (15)..(18): Any L- or D-natural or non-natural amino acid, and this range may     encompass 1 or 4 residues; see specification as filed for detailed  description of substitutions, R-groups and preferred emb
  c-term may be amidated

SEQ ID NO: 880 - protein, 32 aa, Artificial Sequence; identical to SEQ ID NO: 832
  Description of Artificial Sequence: Synthetic peptide
  MOD_RES (7)..(7): Any L- or D-natural amino acid and any non-natural amino acid; see  specification as filed for detail ed description of substitutions, R-groups  and preferred embodiments
  MOD_RES (9)..(10): Any L- or D-natural amino acid and any non-natural amino acid; see  specification as filed for detail ed description of substitutions, R-groups  and preferred embodiments
  MOD_RES (14)..(14): Any L- or D-natural amino acid and any non-natural amino acid; see  specification as filed for detail ed description of substitutions, R-groups  and preferred embodiments
  MOD_RES (15)..(18): Any L- or D-natural or non-natural amino acid, and this range may     encompass 1 or 4 residues; see specification as filed for detailed  description of substitutions, R-groups and preferred emb
  c-term may be amidated

SEQ ID NO: 881 - protein, 32 aa, Artificial Sequence; identical to SEQ ID NO: 833
  Description of Artificial Sequence: Synthetic peptide
  MOD_RES (8)..(10): Any L- or D-natural amino acid and any non-natural amino acid; see  specification as filed for detail ed description of substitutions, R-groups  and preferred embodiments
  MOD_RES (14)..(14): Any L- or D-natural amino acid and any non-natural amino acid; see  specification as filed for detail ed description of substitutions, R-groups  and preferred embodiments
  MOD_RES (15)..(18): Any L- or D-natural or non-natural amino acid, and this range may     encompass 1 or 4 residues; see specification as filed for detailed  description of substitutions, R-groups and preferred emb
  c-term may be amidated

SEQ ID NO: 882 - protein, 9 aa, Artificial Sequence
  Description of Artificial Sequence: Synthetic peptide
  c-term may be amidated
SPYSSDTTP

SEQ ID NO: 883 - protein, 23 aa, Artificial Sequence
  Description of Artificial Sequence: Synthetic peptide
  c-term may be amidated
AFAYIARPLPRAHIKEYFYTSGK

SEQ ID NO: 884 - protein, 15 aa, Artificial Sequence
  Description of Artificial Sequence: Synthetic peptide
  c-term may be amidated
SNPAVVFVTRKNRQV

SEQ ID NO: 885 - protein, 33 aa, Artificial Sequence
  Description of Artificial Sequence: Synthetic peptide
  c-term may be amidated
SPYSSDTTPCCFAYIARPLPRAHIKEYFYTSGK

SEQ ID NO: 886 - protein, 18 aa, Artificial Sequence
  Description of Artificial Sequence: Synthetic peptide
  c-term may be amidated
ANPEKKWVREYINSLEMS

SEQ ID NO: 887 - protein, 33 aa, Artificial Sequence
  Description of Artificial Sequence: Synthetic peptide
  MOD_RES (15)..(18): Any L- or D-natural or non-natural amino acid, and this range may     encompass 1 or 4 residues; see specification as filed for detailed  description of substitutions, R-groups and preferred emb
  c-term may be amidated
SPYSSDTTPCCFAYXXXXEKKWVREYINSLEMS

SEQ ID NO: 888 - protein, 33 aa, Artificial Sequence
  Description of Artificial Sequence: Synthetic peptide
  MOD_RES (1)..(1): Any L- or D-natural amino acid and any non-natural amino acid; see  specification as filed for detail ed description of substitutions, R-groups  and preferred embodiments
  MOD_RES (10)..(11): Any L- or D-natural amino acid and any non-natural amino acid; see  specification as filed for detail ed description of substitutions, R-groups  and preferred embodiments
  MOD_RES (15)..(18): Any L- or D-natural or non-natural amino acid, and this range may     encompass 1 or 4 residues; see specification as filed for detailed  description of substitutions, R-groups and preferred emb
  c-term may be amidated
XPYSSDTTPXXFAYXXXXEKKWVREYINSLEMS

SEQ ID NO: 889 - protein, 33 aa, Artificial Sequence
  Description of Artificial Sequence: Synthetic peptide
  MOD_RES (2)..(2): Any L- or D-natural amino acid and any non-natural amino acid; see  specification as filed for detail ed description of substitutions, R-groups  and preferred embodiments
  MOD_RES (10)..(11): Any L- or D-natural amino acid and any non-natural amino acid; see  specification as filed for detail ed description of substitutions, R-groups  and preferred embodiments
  MOD_RES (15)..(18): Any L- or D-natural or non-natural amino acid, and this range may     encompass 1 or 4 residues; see specification as filed for detailed  description of substitutions, R-groups and preferred emb
  c-term may be amidated
SXYSSDTTPXXFAYXXXXEKKWVREYINSLEMS

SEQ ID NO: 890 - protein, 33 aa, Artificial Sequence
  Description of Artificial Sequence: Synthetic peptide
  MOD_RES (3)..(3): Any L- or D-natural amino acid and any non-natural amino acid; see  specification as filed for detail ed description of substitutions, R-groups  and preferred embodiments
  MOD_RES (10)..(11): Any L- or D-natural amino acid and any non-natural amino acid; see  specification as filed for detail ed description of substitutions, R-groups  and preferred embodiments
  MOD_RES (15)..(18): Any L- or D-natural or non-natural amino acid, and this range may     encompass 1 or 4 residues; see specification as filed for detailed  description of substitutions, R-groups and preferred emb
  c-term may be amidated
SPXSSDTTPXXFAYXXXXEKKWVREYINSLEMS

SEQ ID NO: 891 - protein, 33 aa, Artificial Sequence
  Description of Artificial Sequence: Synthetic peptide
  MOD_RES (4)..(4): Any L- or D-natural amino acid and any non-natural amino acid; see  specification as filed for detail ed description of substitutions, R-groups  and preferred embodiments
  MOD_RES (10)..(11): Any L- or D-natural amino acid and any non-natural amino acid; see  specification as filed for detail ed description of substitutions, R-groups  and preferred embodiments
  MOD_RES (15)..(18): Any L- or D-natural or non-natural amino acid, and this range may     encompass 1 or 4 residues; see specification as filed for detailed  description of substitutions, R-groups and preferred emb
  c-term may be amidated
SPYXSDTTPXXFAYXXXXEKKWVREYINSLEMS

SEQ ID NO: 892 - protein, 33 aa, Artificial Sequence
  Description of Artificial Sequence: Synthetic peptide
  MOD_RES (5)..(5): Any L- or D-natural amino acid and any non-natural amino acid; see  specification as filed for detail ed description of substitutions, R-groups  and preferred embodiments
  MOD_RES (10)..(11): Any L- or D-natural amino acid and any non-natural amino acid; see  specification as filed for detail ed description of substitutions, R-groups  and preferred embodiments
  MOD_RES (15)..(18): Any L- or D-natural or non-natural amino acid, and this range may     encompass 1 or 4 residues; see specification as filed for detailed  description of substitutions, R-groups and preferred emb
  c-term may be amidated
SPYSXDTTPXXFAYXXXXEKKWVREYINSLEMS

SEQ ID NO: 893 - protein, 33 aa, Artificial Sequence
  Description of Artificial Sequence: Synthetic peptide
  MOD_RES (6)..(6): Any L- or D-natural amino acid and any non-natural amino acid; see  specification as filed for detail ed description of substitutions, R-groups  and preferred embodiments
  MOD_RES (10)..(11): Any L- or D-natural amino acid and any non-natural amino acid; see  specification as filed for detail ed description of substitutions, R-groups  and preferred embodiments
  MOD_RES (15)..(18): Any L- or D-natural or non-natural amino acid, and this range may     encompass 1 or 4 residues; see specification as filed for detailed  description of substitutions, R-groups and preferred emb
  c-term may be amidated
SPYSSXTTPXXFAYXXXXEKKWVREYINSLEMS

SEQ ID NO: 894 - protein, 33 aa, Artificial Sequence
  Description of Artificial Sequence: Synthetic peptide
  MOD_RES (7)..(7): Any L- or D-natural amino acid and any non-natural amino acid; see  specification as filed for detail ed description of substitutions, R-groups  and preferred embodiments
  MOD_RES (10)..(11): Any L- or D-natural amino acid and any non-natural amino acid; see  specification as filed for detail ed description of substitutions, R-groups  and preferred embodiments
  MOD_RES (15)..(18): Any L- or D-natural or non-natural amino acid, and this range may     encompass 1 or 4 residues; see specification as filed for detailed  description of substitutions, R-groups and preferred emb
  c-term may be amidated
SPYSSDXTPXXFAYXXXXEKKWVREYINSLEMS

SEQ ID NO: 895 - protein, 33 aa, Artificial Sequence
  Description of Artificial Sequence: Synthetic peptide
  MOD_RES (8)..(8): Any L- or D-natural amino acid and any non-natural amino acid; see  specification as filed for detail ed description of substitutions, R-groups  and preferred embodiments
  MOD_RES (10)..(11): Any L- or D-natural amino acid and any non-natural amino acid; see  specification as filed for detail ed description of substitutions, R-groups  and preferred embodiments
  MOD_RES (15)..(18): Any L- or D-natural or non-natural amino acid, and this range may     encompass 1 or 4 residues; see specification as filed for detailed  description of substitutions, R-groups and preferred emb
  c-term may be amidated
SPYSSDTXPXXFAYXXXXEKKWVREYINSLEMS

SEQ ID NO: 896 - protein, 33 aa, Artificial Sequence
  Description of Artificial Sequence: Synthetic peptide
  MOD_RES (9)..(11): Any L- or D-natural amino acid and any non-natural amino acid; see  specification as filed for detail ed description of substitutions, R-groups  and preferred embodiments
  MOD_RES (15)..(18): Any L- or D-natural or non-natural amino acid, and this range may     encompass 1 or 4 residues; see specification as filed for detailed  description of substitutions, R-groups and preferred emb
  c-term may be amidated
SPYSSDTTXXXFAYXXXXEKKWVREYINSLEMS

SEQ ID NO: 897 - protein, 33 aa, Artificial Sequence
  Description of Artificial Sequence: Synthetic peptide
  MOD_RES (12)..(12): Any L- or D-natural amino acid and any non-natural amino acid; see  specification as filed for detail ed description of substitutions, R-groups  and preferred embodiments
  MOD_RES (15)..(18): Any L- or D-natural or non-natural amino acid, and this range may     encompass 1 or 4 residues; see specification as filed for detailed  description of substitutions, R-groups and preferred emb
  c-term may be amidated
SPYSSDTTPCCXAYXXXXEKKWVREYINSLEMS

SEQ ID NO: 898 - protein, 33 aa, Artificial Sequence
  Description of Artificial Sequence: Synthetic peptide
  MOD_RES (1)..(1): Any L- or D-natural amino acid and any non-natural amino acid; see  specification as filed for detail ed description of substitutions, R-groups  and preferred embodiments
  MOD_RES (10)..(12): Any L- or D-natural amino acid and any non-natural amino acid; see  specification as filed for detail ed description of substitutions, R-groups  and preferred embodiments
  MOD_RES (15)..(18): Any L- or D-natural or non-natural amino acid, and this range may     encompass 1 or 4 residues; see specification as filed for detailed  description of substitutions, R-groups and preferred emb
  c-term may be amidated
XPYSSDTTPXXXAYXXXXEKKWVREYINSLEMS

SEQ ID NO: 899 - protein, 33 aa, Artificial Sequence
  Description of Artificial Sequence: Synthetic peptide
  MOD_RES (2)..(2): Any L- or D-natural amino acid and any non-natural amino acid; see  specification as filed for detail ed description of substitutions, R-groups  and preferred embodiments
  MOD_RES (10)..(12): Any L- or D-natural amino acid and any non-natural amino acid; see  specification as filed for detail ed description of substitutions, R-groups  and preferred embodiments
  MOD_RES (15)..(18): Any L- or D-natural or non-natural amino acid, and this range may     encompass 1 or 4 residues; see specification as filed for detailed  description of substitutions, R-groups and preferred emb
  c-term may be amidated
SXYSSDTTPXXXAYXXXXEKKWVREYINSLEMS

SEQ ID NO: 900 - protein, 33 aa, Artificial Sequence
  Description of Artificial Sequence: Synthetic peptide
  MOD_RES (3)..(3): Any L- or D-natural amino acid and any non-natural amino acid; see  specification as filed for detail ed description of substitutions, R-groups  and preferred embodiments
  MOD_RES (10)..(12): Any L- or D-natural amino acid and any non-natural amino acid; see  specification as filed for detail ed description of substitutions, R-groups  and preferred embodiments
  MOD_RES (15)..(18): Any L- or D-natural or non-natural amino acid, and this range may     encompass 1 or 4 residues; see specification as filed for detailed  description of substitutions, R-groups and preferred emb
  c-term may be amidated
SPXSSDTTPXXXAYXXXXEKKWVREYINSLEMS

SEQ ID NO: 901 - protein, 33 aa, Artificial Sequence
  Description of Artificial Sequence: Synthetic peptide
  MOD_RES (4)..(4): Any L- or D-natural amino acid and any non-natural amino acid; see  specification as filed for detail ed description of substitutions, R-groups  and preferred embodiments
  MOD_RES (10)..(12): Any L- or D-natural amino acid and any non-natural amino acid; see  specification as filed for detail ed description of substitutions, R-groups  and preferred embodiments
  MOD_RES (15)..(18): Any L- or D-natural or non-natural amino acid, and this range may     encompass 1 or 4 residues; see specification as filed for detailed  description of substitutions, R-groups and preferred emb
  c-term may be amidated
SPYXSDTTPXXXAYXXXXEKKWVREYINSLEMS

SEQ ID NO: 902 - protein, 33 aa, Artificial Sequence
  Description of Artificial Sequence: Synthetic peptide
  MOD_RES (5)..(5): Any L- or D-natural amino acid and any non-natural amino acid; see  specification as filed for detail ed description of substitutions, R-groups  and preferred embodiments
  MOD_RES (10)..(12): Any L- or D-natural amino acid and any non-natural amino acid; see  specification as filed for detail ed description of substitutions, R-groups  and preferred embodiments
  MOD_RES (15)..(18): Any L- or D-natural or non-natural amino acid, and this range may     encompass 1 or 4 residues; see specification as filed for detailed  description of substitutions, R-groups and preferred emb
  c-term may be amidated
SPYSXDTTPXXXAYXXXXEKKWVREYINSLEMS

SEQ ID NO: 903 - protein, 33 aa, Artificial Sequence
  Description of Artificial Sequence: Synthetic peptide
  MOD_RES (6)..(6): Any L- or D-natural amino acid and any non-natural amino acid; see  specification as filed for detail ed description of substitutions, R-groups  and preferred embodiments
  MOD_RES (10)..(12): Any L- or D-natural amino acid and any non-natural amino acid; see  specification as filed for detail ed description of substitutions, R-groups  and preferred embodiments
  MOD_RES (15)..(18): Any L- or D-natural or non-natural amino acid, and this range may     encompass 1 or 4 residues; see specification as filed for detailed  description of substitutions, R-groups and preferred emb
  c-term may be amidated
SPYSSXTTPXXXAYXXXXEKKWVREYINSLEMS

SEQ ID NO: 904 - protein, 33 aa, Artificial Sequence
  Description of Artificial Sequence: Synthetic peptide
  MOD_RES (7)..(7): Any L- or D-natural amino acid and any non-natural amino acid; see  specification as filed for detail ed description of substitutions, R-groups  and preferred embodiments
  MOD_RES (10)..(12): Any L- or D-natural amino acid and any non-natural amino acid; see  specification as filed for detail ed description of substitutions, R-groups  and preferred embodiments
  MOD_RES (15)..(18): Any L- or D-natural or non-natural amino acid, and this range may     encompass 1 or 4 residues; see specification as filed for detailed  description of substitutions, R-groups and preferred emb
  c-term may be amidated
SPYSSDXTPXXXAYXXXXEKKWVREYINSLEMS

SEQ ID NO: 905 - protein, 33 aa, Artificial Sequence
  Description of Artificial Sequence: Synthetic peptide
  MOD_RES (8)..(8): Any L- or D-natural amino acid and any non-natural amino acid; see  specification as filed for detail ed description of substitutions, R-groups  and preferred embodiments
  MOD_RES (10)..(12): Any L- or D-natural amino acid and any non-natural amino acid; see  specification as filed for detail ed description of substitutions, R-groups  and preferred embodiments
  MOD_RES (15)..(18): Any L- or D-natural or non-natural amino acid, and this range may     encompass 1 or 4 residues; see specification as filed for detailed  description of substitutions, R-groups and preferred emb
  c-term may be amidated
SPYSSDTXPXXXAYXXXXEKKWVREYINSLEMS

SEQ ID NO: 906 - protein, 33 aa, Artificial Sequence
  Description of Artificial Sequence: Synthetic peptide
  MOD_RES (9)..(12): Any L- or D-natural amino acid and any non-natural amino acid; see  specification as filed for detail ed description of substitutions, R-groups  and preferred embodiments
  MOD_RES (15)..(18): Any L- or D-natural or non-natural amino acid, and this range may     encompass 1 or 4 residues; see specification as filed for detailed  description of substitutions, R-groups and preferred emb
  c-term may be amidated
SPYSSDTTXXXXAYXXXXEKKWVREYINSLEMS

SEQ ID NO: 907 - protein, 33 aa, Artificial Sequence
  Description of Artificial Sequence: Synthetic peptide
  MOD_RES (13)..(13): Any L- or D-natural amino acid and any non-natural amino acid; see  specification as filed for detail ed description of substitutions, R-groups  and preferred embodiments
  MOD_RES (15)..(18): Any L- or D-natural or non-natural amino acid, and this range may     encompass 1 or 4 residues; see specification as filed for detailed  description of substitutions, R-groups and preferred emb
  c-term may be amidated
SPYSSDTTPCCFXYXXXXEKKWVREYINSLEMS

SEQ ID NO: 908 - protein, 33 aa, Artificial Sequence
  Description of Artificial Sequence: Synthetic peptide
  MOD_RES (1)..(1): Any L- or D-natural amino acid and any non-natural amino acid; see  specification as filed for detail ed description of substitutions, R-groups  and preferred embodiments
  MOD_RES (10)..(11): Any L- or D-natural amino acid and any non-natural amino acid; see  specification as filed for detail ed description of substitutions, R-groups  and preferred embodiments
  MOD_RES (13)..(13): Any L- or D-natural amino acid and any non-natural amino acid; see  specification as filed for detail ed description of substitutions, R-groups  and preferred embodiments
  MOD_RES (15)..(18): Any L- or D-natural or non-natural amino acid, and this range may     encompass 1 or 4 residues; see specification as filed for detailed  description of substitutions, R-groups and preferred emb
  c-term may be amidated
XPYSSDTTPXXFXYXXXXEKKWVREYINSLEMS

SEQ ID NO: 909 - protein, 33 aa, Artificial Sequence
  Description of Artificial Sequence: Synthetic peptide
  MOD_RES (2)..(2): Any L- or D-natural amino acid and any non-natural amino acid; see  specification as filed for detail ed description of substitutions, R-groups  and preferred embodiments
  MOD_RES (10)..(11): Any L- or D-natural amino acid and any non-natural amino acid; see  specification as filed for detail ed description of substitutions, R-groups  and preferred embodiments
  MOD_RES (13)..(13): Any L- or D-natural amino acid and any non-natural amino acid; see  specification as filed for detail ed description of substitutions, R-groups  and preferred embodiments
  MOD_RES (15)..(18): Any L- or D-natural or non-natural amino acid, and this range may     encompass 1 or 4 residues; see specification as filed for detailed  description of substitutions, R-groups and preferred emb
  c-term may be amidated
SXYSSDTTPXXFXYXXXXEKKWVREYINSLEMS

SEQ ID NO: 910 - protein, 33 aa, Artificial Sequence
  Description of Artificial Sequence: Synthetic peptide
  MOD_RES (3)..(3): Any L- or D-natural amino acid and any non-natural amino acid; see  specification as filed for detail ed description of substitutions, R-groups  and preferred embodiments
  MOD_RES (10)..(11): Any L- or D-natural amino acid and any non-natural amino acid; see  specification as filed for detail ed description of substitutions, R-groups  and preferred embodiments
  MOD_RES (13)..(13): Any L- or D-natural amino acid and any non-natural amino acid; see  specification as filed for detail ed description of substitutions, R-groups  and preferred embodiments
  MOD_RES (15)..(18): Any L- or D-natural or non-natural amino acid, and this range may     encompass 1 or 4 residues; see specification as filed for detailed  description of substitutions, R-groups and preferred emb
  c-term may be amidated
SPXSSDTTPXXFXYXXXXEKKWVREYINSLEMS

SEQ ID NO: 911 - protein, 33 aa, Artificial Sequence
  Description of Artificial Sequence: Synthetic peptide
  MOD_RES (4)..(4): Any L- or D-natural amino acid and any non-natural amino acid; see  specification as filed for detail ed description of substitutions, R-groups  and preferred embodiments
  MOD_RES (10)..(11): Any L- or D-natural amino acid and any non-natural amino acid; see  specification as filed for detail ed description of substitutions, R-groups  and preferred embodiments
  MOD_RES (13)..(13): Any L- or D-natural amino acid and any non-natural amino acid; see  specification as filed for detail ed description of substitutions, R-groups  and preferred embodiments
  MOD_RES (15)..(18): Any L- or D-natural or non-natural amino acid, and this range may     encompass 1 or 4 residues; see specification as filed for detailed  description of substitutions, R-groups and preferred emb
  c-term may be amidated
SPYXSDTTPXXFXYXXXXEKKWVREYINSLEMS

SEQ ID NO: 912 - protein, 33 aa, Artificial Sequence
  Description of Artificial Sequence: Synthetic peptide
  MOD_RES (5)..(5): Any L- or D-natural amino acid and any non-natural amino acid; see  specification as filed for detail ed description of substitutions, R-groups  and preferred embodiments
  MOD_RES (10)..(11): Any L- or D-natural amino acid and any non-natural amino acid; see  specification as filed for detail ed description of substitutions, R-groups  and preferred embodiments
  MOD_RES (13)..(13): Any L- or D-natural amino acid and any non-natural amino acid; see  specification as filed for detail ed description of substitutions, R-groups  and preferred embodiments
  MOD_RES (15)..(18): Any L- or D-natural or non-natural amino acid, and this range may     encompass 1 or 4 residues; see specification as filed for detailed  description of substitutions, R-groups and preferred emb
  c-term may be amidated
SPYSXDTTPXXFXYXXXXEKKWVREYINSLEMS

SEQ ID NO: 913 - protein, 33 aa, Artificial Sequence
  Description of Artificial Sequence: Synthetic peptide
  MOD_RES (6)..(6): Any L- or D-natural amino acid and any non-natural amino acid; see  specification as filed for detail ed description of substitutions, R-groups  and preferred embodiments
  MOD_RES (10)..(11): Any L- or D-natural amino acid and any non-natural amino acid; see  specification as filed for detail ed description of substitutions, R-groups  and preferred embodiments
  MOD_RES (13)..(13): Any L- or D-natural amino acid and any non-natural amino acid; see  specification as filed for detail ed description of substitutions, R-groups  and preferred embodiments
  MOD_RES (15)..(18): Any L- or D-natural or non-natural amino acid, and this range may     encompass 1 or 4 residues; see specification as filed for detailed  description of substitutions, R-groups and preferred emb
  c-term may be amidated
SPYSSXTTPXXFXYXXXXEKKWVREYINSLEMS

SEQ ID NO: 914 - protein, 33 aa, Artificial Sequence
  Description of Artificial Sequence: Synthetic peptide
  MOD_RES (7)..(7): Any L- or D-natural amino acid and any non-natural amino acid; see  specification as filed for detail ed description of substitutions, R-groups  and preferred embodiments
  MOD_RES (10)..(11): Any L- or D-natural amino acid and any non-natural amino acid; see  specification as filed for detail ed description of substitutions, R-groups  and preferred embodiments
  MOD_RES (13)..(13): Any L- or D-natural amino acid and any non-natural amino acid; see  specification as filed for detail ed description of substitutions, R-groups  and preferred embodiments
  MOD_RES (15)..(18): Any L- or D-natural or non-natural amino acid, and this range may     encompass 1 or 4 residues; see specification as filed for detailed  description of substitutions, R-groups and preferred emb
  c-term may be amidated
SPYSSDXTPXXFXYXXXXEKKWVREYINSLEMS

SEQ ID NO: 915 - protein, 33 aa, Artificial Sequence
  Description of Artificial Sequence: Synthetic peptide
  MOD_RES (8)..(8): Any L- or D-natural amino acid and any non-natural amino acid; see  specification as filed for detail ed description of substitutions, R-groups  and preferred embodiments
  MOD_RES (10)..(11): Any L- or D-natural amino acid and any non-natural amino acid; see  specification as filed for detail ed description of substitutions, R-groups  and preferred embodiments
  MOD_RES (13)..(13): Any L- or D-natural amino acid and any non-natural amino acid; see  specification as filed for detail ed description of substitutions, R-groups  and preferred embodiments
  MOD_RES (15)..(18): Any L- or D-natural or non-natural amino acid, and this range may     encompass 1 or 4 residues; see specification as filed for detailed  description of substitutions, R-groups and preferred emb
  c-term may be amidated
SPYSSDTXPXXFXYXXXXEKKWVREYINSLEMS

SEQ ID NO: 916 - protein, 33 aa, Artificial Sequence
  Description of Artificial Sequence: Synthetic peptide
  MOD_RES (9)..(11): Any L- or D-natural amino acid and any non-natural amino acid; see  specification as filed for detail ed description of substitutions, R-groups  and preferred embodiments
  MOD_RES (13)..(13): Any L- or D-natural amino acid and any non-natural amino acid; see  specification as filed for detail ed description of substitutions, R-groups  and preferred embodiments
  MOD_RES (15)..(18): Any L- or D-natural or non-natural amino acid, and this range may     encompass 1 or 4 residues; see specification as filed for detailed  description of substitutions, R-groups and preferred emb
  c-term may be amidated
SPYSSDTTXXXFXYXXXXEKKWVREYINSLEMS

SEQ ID NO: 917 - protein, 33 aa, Artificial Sequence
  Description of Artificial Sequence: Synthetic peptide
  MOD_RES (14)..(14): Any L- or D-natural amino acid and any non-natural amino acid; see  specification as filed for detail ed description of substitutions, R-groups  and preferred embodiments
  MOD_RES (15)..(18): Any L- or D-natural or non-natural amino acid, and this range may     encompass 1 or 4 residues; see specification as filed for detailed  description of substitutions, R-groups and preferred emb
  c-term may be amidated
SPYSSDTTPCCFAXXXXXEKKWVREYINSLEMS

SEQ ID NO: 918 - protein, 33 aa, Artificial Sequence
  Description of Artificial Sequence: Synthetic peptide
  MOD_RES (1)..(1): Any L- or D-natural amino acid and any non-natural amino acid; see  specification as filed for detail ed description of substitutions, R-groups  and preferred embodiments
  MOD_RES (10)..(11): Any L- or D-natural amino acid and any non-natural amino acid; see  specification as filed for detail ed description of substitutions, R-groups  and preferred embodiments
  MOD_RES (14)..(14): Any L- or D-natural amino acid and any non-natural amino acid; see  specification as filed for detail ed description of substitutions, R-groups  and preferred embodiments
  MOD_RES (15)..(18): Any L- or D-natural or non-natural amino acid, and this range may     encompass 1 or 4 residues; see specification as filed for detailed  description of substitutions, R-groups and preferred emb
  c-term may be amidated
XPYSSDTTPXXFAXXXXXEKKWVREYINSLEMS

SEQ ID NO: 919 - protein, 33 aa, Artificial Sequence
  Description of Artificial Sequence: Synthetic peptide
  MOD_RES (2)..(2): Any L- or D-natural amino acid and any non-natural amino acid; see  specification as filed for detail ed description of substitutions, R-groups  and preferred embodiments
  MOD_RES (10)..(11): Any L- or D-natural amino acid and any non-natural amino acid; see  specification as filed for detail ed description of substitutions, R-groups  and preferred embodiments
  MOD_RES (14)..(14): Any L- or D-natural amino acid and any non-natural amino acid; see  specification as filed for detail ed description of substitutions, R-groups  and preferred embodiments
  MOD_RES (15)..(18): Any L- or D-natural or non-natural amino acid, and this range may     encompass 1 or 4 residues; see specification as filed for detailed  description of substitutions, R-groups and preferred emb
  c-term may be amidated
SXYSSDTTPXXFAXXXXXEKKWVREYINSLEMS

SEQ ID NO: 920 - protein, 33 aa, Artificial Sequence
  Description of Artificial Sequence: Synthetic peptide
  MOD_RES (3)..(3): Any L- or D-natural amino acid and any non-natural amino acid; see  specification as filed for detail ed description of substitutions, R-groups  and preferred embodiments
  MOD_RES (10)..(11): Any L- or D-natural amino acid and any non-natural amino acid; see  specification as filed for detail ed description of substitutions, R-groups  and preferred embodiments
  MOD_RES (14)..(14): Any L- or D-natural amino acid and any non-natural amino acid; see  specification as filed for detail ed description of substitutions, R-groups  and preferred embodiments
  MOD_RES (15)..(18): Any L- or D-natural or non-natural amino acid, and this range may     encompass 1 or 4 residues; see specification as filed for detailed  description of substitutions, R-groups and preferred emb
  c-term may be amidated
SPXSSDTTPXXFAXXXXXEKKWVREYINSLEMS

SEQ ID NO: 921 - protein, 33 aa, Artificial Sequence
  Description of Artificial Sequence: Synthetic peptide
  MOD_RES (4)..(4): Any L- or D-natural amino acid and any non-natural amino acid; see  specification as filed for detail ed description of substitutions, R-groups  and preferred embodiments
  MOD_RES (10)..(11): Any L- or D-natural amino acid and any non-natural amino acid; see  specification as filed for detail ed description of substitutions, R-groups  and preferred embodiments
  MOD_RES (14)..(14): Any L- or D-natural amino acid and any non-natural amino acid; see  specification as filed for detail ed description of substitutions, R-groups  and preferred embodiments
  MOD_RES (15)..(18): Any L- or D-natural or non-natural amino acid, and this range may     encompass 1 or 4 residues; see specification as filed for detailed  description of substitutions, R-groups and preferred emb
  c-term may be amidated
SPYXSDTTPXXFAXXXXXEKKWVREYINSLEMS

SEQ ID NO: 922 - protein, 33 aa, Artificial Sequence
  Description of Artificial Sequence: Synthetic peptide
  MOD_RES (5)..(5): Any L- or D-natural amino acid and any non-natural amino acid; see  specification as filed for detail ed description of substitutions, R-groups  and preferred embodiments
  MOD_RES (10)..(11): Any L- or D-natural amino acid and any non-natural amino acid; see  specification as filed for detail ed description of substitutions, R-groups  and preferred embodiments
  MOD_RES (14)..(14): Any L- or D-natural amino acid and any non-natural amino acid; see  specification as filed for detail ed description of substitutions, R-groups  and preferred embodiments
  MOD_RES (15)..(18): Any L- or D-natural or non-natural amino acid, and this range may     encompass 1 or 4 residues; see specification as filed for detailed  description of substitutions, R-groups and preferred emb
  c-term may be amidated
SPYSXDTTPXXFAXXXXXEKKWVREYINSLEMS

SEQ ID NO: 923 - protein, 33 aa, Artificial Sequence
  Description of Artificial Sequence: Synthetic peptide
  MOD_RES (6)..(6): Any L- or D-natural amino acid and any non-natural amino acid; see  specification as filed for detail ed description of substitutions, R-groups  and preferred embodiments
  MOD_RES (10)..(11): Any L- or D-natural amino acid and any non-natural amino acid; see  specification as filed for detail ed description of substitutions, R-groups  and preferred embodiments
  MOD_RES (14)..(14): Any L- or D-natural amino acid and any non-natural amino acid; see  specification as filed for detail ed description of substitutions, R-groups  and preferred embodiments
  MOD_RES (15)..(18): Any L- or D-natural or non-natural amino acid, and this range may     encompass 1 or 4 residues; see specification as filed for detailed  description of substitutions, R-groups and preferred emb
  c-term may be amidated
SPYSSXTTPXXFAXXXXXEKKWVREYINSLEMS

SEQ ID NO: 924 - protein, 33 aa, Artificial Sequence
  Description of Artificial Sequence: Synthetic peptide
  MOD_RES (7)..(7): Any L- or D-natural amino acid and any non-natural amino acid; see  specification as filed for detail ed description of substitutions, R-groups  and preferred embodiments
  MOD_RES (10)..(11): Any L- or D-natural amino acid and any non-natural amino acid; see  specification as filed for detail ed description of substitutions, R-groups  and preferred embodiments
  MOD_RES (14)..(14): Any L- or D-natural amino acid and any non-natural amino acid; see  specification as filed for detail ed description of substitutions, R-groups  and preferred embodiments
  MOD_RES (15)..(18): Any L- or D-natural or non-natural amino acid, and this range may     encompass 1 or 4 residues; see specification as filed for detailed  description of substitutions, R-groups and preferred emb
  c-term may be amidated
SPYSSDXTPXXFAXXXXXEKKWVREYINSLEMS

SEQ ID NO: 925 - protein, 33 aa, Artificial Sequence
  Description of Artificial Sequence: Synthetic peptide
  MOD_RES (8)..(8): Any L- or D-natural amino acid and any non-natural amino acid; see  specification as filed for detail ed description of substitutions, R-groups  and preferred embodiments
  MOD_RES (10)..(11): Any L- or D-natural amino acid and any non-natural amino acid; see  specification as filed for detail ed description of substitutions, R-groups  and preferred embodiments
  MOD_RES (14)..(14): Any L- or D-natural amino acid and any non-natural amino acid; see  specification as filed for detail ed description of substitutions, R-groups  and preferred embodiments
  MOD_RES (15)..(18): Any L- or D-natural or non-natural amino acid, and this range may     encompass 1 or 4 residues; see specification as filed for detailed  description of substitutions, R-groups and preferred emb
  c-term may be amidated
SPYSSDTXPXXFAXXXXXEKKWVREYINSLEMS

SEQ ID NO: 926 - protein, 33 aa, Artificial Sequence
  Description of Artificial Sequence: Synthetic peptide
  MOD_RES (9)..(11): Any L- or D-natural amino acid and any non-natural amino acid; see  specification as filed for detail ed description of substitutions, R-groups  and preferred embodiments
  MOD_RES (14)..(14): Any L- or D-natural amino acid and any non-natural amino acid; see  specification as filed for detail ed description of substitutions, R-groups  and preferred embodiments
  MOD_RES (15)..(18): Any L- or D-natural or non-natural amino acid, and this range may     encompass 1 or 4 residues; see specification as filed for detailed  description of substitutions, R-groups and preferred emb
  c-term may be amidated
SPYSSDTTXXXFAXXXXXEKKWVREYINSLEMS

SEQ ID NO: 927 - protein, 25 aa, Artificial Sequence
  Description of Artificial Sequence: Synthetic peptide
  c-term may be amidated
ACFAYIARPLPRAHIKEYFYTSGKC

SEQ ID NO: 928 - protein, 24 aa, Artificial Sequence
  Description of Artificial Sequence: Synthetic peptide
  c-term may be amidated
ECFAYIARPLPRAHIKEYFYTSGK

SEQ ID NO: 929 - protein, 24 aa, Artificial Sequence
  Description of Artificial Sequence: Synthetic peptide
  c-term may be amidated
ACFAYIARPLPRAHIKEYFYTSGK

SEQ ID NO: 930 - protein, 33 aa, Artificial Sequence; identical to SEQ ID NO: 885
  Description of Artificial Sequence: Synthetic peptide
  c-term may be amidated

SEQ ID NO: 931 - protein, 33 aa, Artificial Sequence
  Description of Artificial Sequence: Synthetic peptide
  MOD_RES (10)..(11): Any L- or D-natural amino acid and any non-natural amino acid; see  specification as filed for detail ed description of substitutions, R-groups  and preferred embodiments
  c-term may be amidated
SPYSSDTTPXXFAYIARPLPRAHIKEYFYTSGK

SEQ ID NO: 932 - protein, 33 aa, Artificial Sequence; identical to SEQ ID NO: 887
  Description of Artificial Sequence: Synthetic peptide
  MOD_RES (15)..(18): Any L- or D-natural or non-natural amino acid, and this range may     encompass 1 or 4 residues; see specification as filed for detailed  description of substitutions, R-groups and preferred emb
  c-term may be amidated

SEQ ID NO: 933 - protein, 33 aa, Artificial Sequence; identical to SEQ ID NO: 888
  Description of Artificial Sequence: Synthetic peptide
  MOD_RES (1)..(1): Any L- or D-natural amino acid and any non-natural amino acid; see  specification as filed for detail ed description of substitutions, R-groups  and preferred embodiments
  MOD_RES (10)..(11): Any L- or D-natural amino acid and any non-natural amino acid; see  specification as filed for detail ed description of substitutions, R-groups  and preferred embodiments
  MOD_RES (15)..(18): Any L- or D-natural or non-natural amino acid, and this range may     encompass 1 or 4 residues; see specification as filed for detailed  description of substitutions, R-groups and preferred emb
  c-term may be amidated

SEQ ID NO: 934 - protein, 33 aa, Artificial Sequence; identical to SEQ ID NO: 889
  Description of Artificial Sequence: Synthetic peptide
  MOD_RES (2)..(2): Any L- or D-natural amino acid and any non-natural amino acid; see  specification as filed for detail ed description of substitutions, R-groups  and preferred embodiments
  MOD_RES (10)..(11): Any L- or D-natural amino acid and any non-natural amino acid; see  specification as filed for detail ed description of substitutions, R-groups  and preferred embodiments
  MOD_RES (15)..(18): Any L- or D-natural or non-natural amino acid, and this range may     encompass 1 or 4 residues; see specification as filed for detailed  description of substitutions, R-groups and preferred emb
  c-term may be amidated

SEQ ID NO: 935 - protein, 33 aa, Artificial Sequence; identical to SEQ ID NO: 890
  Description of Artificial Sequence: Synthetic peptide
  MOD_RES (3)..(3): Any L- or D-natural amino acid and any non-natural amino acid; see  specification as filed for detail ed description of substitutions, R-groups  and preferred embodiments
  MOD_RES (10)..(11): Any L- or D-natural amino acid and any non-natural amino acid; see  specification as filed for detail ed description of substitutions, R-groups  and preferred embodiments
  MOD_RES (15)..(18): Any L- or D-natural or non-natural amino acid, and this range may     encompass 1 or 4 residues; see specification as filed for detailed  description of substitutions, R-groups and preferred emb
  c-term may be amidated

SEQ ID NO: 936 - protein, 33 aa, Artificial Sequence; identical to SEQ ID NO: 891
  Description of Artificial Sequence: Synthetic peptide
  MOD_RES (4)..(4): Any L- or D-natural amino acid and any non-natural amino acid; see  specification as filed for detail ed description of substitutions, R-groups  and preferred embodiments
  MOD_RES (10)..(11): Any L- or D-natural amino acid and any non-natural amino acid; see  specification as filed for detail ed description of substitutions, R-groups  and preferred embodiments
  MOD_RES (15)..(18): Any L- or D-natural or non-natural amino acid, and this range may     encompass 1 or 4 residues; see specification as filed for detailed  description of substitutions, R-groups and preferred emb
  c-term may be amidated

SEQ ID NO: 937 - protein, 33 aa, Artificial Sequence; identical to SEQ ID NO: 892
  Description of Artificial Sequence: Synthetic peptide
  MOD_RES (5)..(5): Any L- or D-natural amino acid and any non-natural amino acid; see  specification as filed for detail ed description of substitutions, R-groups  and preferred embodiments
  MOD_RES (10)..(11): Any L- or D-natural amino acid and any non-natural amino acid; see  specification as filed for detail ed description of substitutions, R-groups  and preferred embodiments
  MOD_RES (15)..(18): Any L- or D-natural or non-natural amino acid, and this range may     encompass 1 or 4 residues; see specification as filed for detailed  description of substitutions, R-groups and preferred emb
  c-term may be amidated

SEQ ID NO: 938 - protein, 33 aa, Artificial Sequence; identical to SEQ ID NO: 893
  Description of Artificial Sequence: Synthetic peptide
  MOD_RES (6)..(6): Any L- or D-natural amino acid and any non-natural amino acid; see  specification as filed for detail ed description of substitutions, R-groups  and preferred embodiments
  MOD_RES (10)..(11): Any L- or D-natural amino acid and any non-natural amino acid; see  specification as filed for detail ed description of substitutions, R-groups  and preferred embodiments
  MOD_RES (15)..(18): Any L- or D-natural or non-natural amino acid, and this range may     encompass 1 or 4 residues; see specification as filed for detailed  description of substitutions, R-groups and preferred emb
  c-term may be amidated

SEQ ID NO: 939 - protein, 33 aa, Artificial Sequence; identical to SEQ ID NO: 894
  Description of Artificial Sequence: Synthetic peptide
  MOD_RES (7)..(7): Any L- or D-natural amino acid and any non-natural amino acid; see  specification as filed for detail ed description of substitutions, R-groups  and preferred embodiments
  MOD_RES (10)..(11): Any L- or D-natural amino acid and any non-natural amino acid; see  specification as filed for detail ed description of substitutions, R-groups  and preferred embodiments
  MOD_RES (15)..(18): Any L- or D-natural or non-natural amino acid, and this range may     encompass 1 or 4 residues; see specification as filed for detailed  description of substitutions, R-groups and preferred emb
  c-term may be amidated

SEQ ID NO: 940 - protein, 33 aa, Artificial Sequence; identical to SEQ ID NO: 895
  Description of Artificial Sequence: Synthetic peptide
  MOD_RES (8)..(8): Any L- or D-natural amino acid and any non-natural amino acid; see  specification as filed for detail ed description of substitutions, R-groups  and preferred embodiments
  MOD_RES (10)..(11): Any L- or D-natural amino acid and any non-natural amino acid; see  specification as filed for detail ed description of substitutions, R-groups  and preferred embodiments
  MOD_RES (15)..(18): Any L- or D-natural or non-natural amino acid, and this range may     encompass 1 or 4 residues; see specification as filed for detailed  description of substitutions, R-groups and preferred emb
  c-term may be amidated

SEQ ID NO: 941 - protein, 33 aa, Artificial Sequence; identical to SEQ ID NO: 896
  Description of Artificial Sequence: Synthetic peptide
  MOD_RES (9)..(11): Any L- or D-natural amino acid and any non-natural amino acid; see  specification as filed for detail ed description of substitutions, R-groups  and preferred embodiments
  MOD_RES (15)..(18): Any L- or D-natural or non-natural amino acid, and this range may     encompass 1 or 4 residues; see specification as filed for detailed  description of substitutions, R-groups and preferred emb
  c-term may be amidated

SEQ ID NO: 942 - protein, 33 aa, Artificial Sequence; identical to SEQ ID NO: 897
  Description of Artificial Sequence: Synthetic peptide
  MOD_RES (12)..(12): Any L- or D-natural amino acid and any non-natural amino acid; see  specification as filed for detail ed description of substitutions, R-groups  and preferred embodiments
  MOD_RES (15)..(18): Any L- or D-natural or non-natural amino acid, and this range may     encompass 1 or 4 residues; see specification as filed for detailed  description of substitutions, R-groups and preferred emb
  c-term may be amidated

SEQ ID NO: 943 - protein, 33 aa, Artificial Sequence; identical to SEQ ID NO: 898
  Description of Artificial Sequence: Synthetic peptide
  MOD_RES (1)..(1): Any L- or D-natural amino acid and any non-natural amino acid; see  specification as filed for detail ed description of substitutions, R-groups  and preferred embodiments
  MOD_RES (10)..(12): Any L- or D-natural amino acid and any non-natural amino acid; see  specification as filed for detail ed description of substitutions, R-groups  and preferred embodiments
  MOD_RES (15)..(18): Any L- or D-natural or non-natural amino acid, and this range may     encompass 1 or 4 residues; see specification as filed for detailed  description of substitutions, R-groups and preferred emb
  c-term may be amidated

SEQ ID NO: 944 - protein, 33 aa, Artificial Sequence; identical to SEQ ID NO: 899
  Description of Artificial Sequence: Synthetic peptide
  MOD_RES (2)..(2): Any L- or D-natural amino acid and any non-natural amino acid; see  specification as filed for detail ed description of substitutions, R-groups  and preferred embodiments
  MOD_RES (10)..(12): Any L- or D-natural amino acid and any non-natural amino acid; see  specification as filed for detail ed description of substitutions, R-groups  and preferred embodiments
  MOD_RES (15)..(18): Any L- or D-natural or non-natural amino acid, and this range may     encompass 1 or 4 residues; see specification as filed for detailed  description of substitutions, R-groups and preferred emb
  c-term may be amidated

SEQ ID NO: 945 - protein, 33 aa, Artificial Sequence; identical to SEQ ID NO: 900
  Description of Artificial Sequence: Synthetic peptide
  MOD_RES (3)..(3): Any L- or D-natural amino acid and any non-natural amino acid; see  specification as filed for detail ed description of substitutions, R-groups  and preferred embodiments
  MOD_RES (10)..(12): Any L- or D-natural amino acid and any non-natural amino acid; see  specification as filed for detail ed description of substitutions, R-groups  and preferred embodiments
  MOD_RES (15)..(18): Any L- or D-natural or non-natural amino acid, and this range may     encompass 1 or 4 residues; see specification as filed for detailed  description of substitutions, R-groups and preferred emb
  c-term may be amidated

SEQ ID NO: 946 - protein, 33 aa, Artificial Sequence; identical to SEQ ID NO: 901
  Description of Artificial Sequence: Synthetic peptide
  MOD_RES (4)..(4): Any L- or D-natural amino acid and any non-natural amino acid; see  specification as filed for detail ed description of substitutions, R-groups  and preferred embodiments
  MOD_RES (10)..(12): Any L- or D-natural amino acid and any non-natural amino acid; see  specification as filed for detail ed description of substitutions, R-groups  and preferred embodiments
  MOD_RES (15)..(18): Any L- or D-natural or non-natural amino acid, and this range may     encompass 1 or 4 residues; see specification as filed for detailed  description of substitutions, R-groups and preferred emb
  c-term may be amidated

SEQ ID NO: 947 - protein, 33 aa, Artificial Sequence; identical to SEQ ID NO: 902
  Description of Artificial Sequence: Synthetic peptide
  MOD_RES (5)..(5): Any L- or D-natural amino acid and any non-natural amino acid; see  specification as filed for detail ed description of substitutions, R-groups  and preferred embodiments
  MOD_RES (10)..(12): Any L- or D-natural amino acid and any non-natural amino acid; see  specification as filed for detail ed description of substitutions, R-groups  and preferred embodiments
  MOD_RES (15)..(18): Any L- or D-natural or non-natural amino acid, and this range may     encompass 1 or 4 residues; see specification as filed for detailed  description of substitutions, R-groups and preferred emb
  c-term may be amidated

SEQ ID NO: 948 - protein, 33 aa, Artificial Sequence; identical to SEQ ID NO: 903
  Description of Artificial Sequence: Synthetic peptide
  MOD_RES (6)..(6): Any L- or D-natural amino acid and any non-natural amino acid; see  specification as filed for detail ed description of substitutions, R-groups  and preferred embodiments
  MOD_RES (10)..(12): Any L- or D-natural amino acid and any non-natural amino acid; see  specification as filed for detail ed description of substitutions, R-groups  and preferred embodiments
  MOD_RES (15)..(18): Any L- or D-natural or non-natural amino acid, and this range may     encompass 1 or 4 residues; see specification as filed for detailed  description of substitutions, R-groups and preferred emb
  c-term may be amidated

SEQ ID NO: 949 - protein, 33 aa, Artificial Sequence; identical to SEQ ID NO: 904
  Description of Artificial Sequence: Synthetic peptide
  MOD_RES (7)..(7): Any L- or D-natural amino acid and any non-natural amino acid; see  specification as filed for detail ed description of substitutions, R-groups  and preferred embodiments
  MOD_RES (10)..(12): Any L- or D-natural amino acid and any non-natural amino acid; see  specification as filed for detail ed description of substitutions, R-groups  and preferred embodiments
  MOD_RES (15)..(18): Any L- or D-natural or non-natural amino acid, and this range may     encompass 1 or 4 residues; see specification as filed for detailed  description of substitutions, R-groups and preferred emb
  c-term may be amidated

SEQ ID NO: 950 - protein, 33 aa, Artificial Sequence; identical to SEQ ID NO: 905
  Description of Artificial Sequence: Synthetic peptide
  MOD_RES (8)..(8): Any L- or D-natural amino acid and any non-natural amino acid; see  specification as filed for detail ed description of substitutions, R-groups  and preferred embodiments
  MOD_RES (10)..(12): Any L- or D-natural amino acid and any non-natural amino acid; see  specification as filed for detail ed description of substitutions, R-groups  and preferred embodiments
  MOD_RES (15)..(18): Any L- or D-natural or non-natural amino acid, and this range may     encompass 1 or 4 residues; see specification as filed for detailed  description of substitutions, R-groups and preferred emb
  c-term may be amidated

SEQ ID NO: 951 - protein, 33 aa, Artificial Sequence; identical to SEQ ID NO: 906
  Description of Artificial Sequence: Synthetic peptide
  MOD_RES (9)..(12): Any L- or D-natural amino acid and any non-natural amino acid; see  specification as filed for detail ed description of substitutions, R-groups  and preferred embodiments
  MOD_RES (15)..(18): Any L- or D-natural or non-natural amino acid, and this range may     encompass 1 or 4 residues; see specification as filed for detailed  description of substitutions, R-groups and preferred emb
  c-term may be amidated

SEQ ID NO: 952 - protein, 33 aa, Artificial Sequence; identical to SEQ ID NO: 907
  Description of Artificial Sequence: Synthetic peptide
  MOD_RES (13)..(13): Any L- or D-natural amino acid and any non-natural amino acid; see  specification as filed for detail ed description of substitutions, R-groups  and preferred embodiments
  MOD_RES (15)..(18): Any L- or D-natural or non-natural amino acid, and this range may     encompass 1 or 4 residues; see specification as filed for detailed  description of substitutions, R-groups and preferred emb
  c-term may be amidated

SEQ ID NO: 953 - protein, 33 aa, Artificial Sequence; identical to SEQ ID NO: 908
  Description of Artificial Sequence: Synthetic peptide
  MOD_RES (1)..(1): Any L- or D-natural amino acid and any non-natural amino acid; see  specification as filed for detail ed description of substitutions, R-groups  and preferred embodiments
  MOD_RES (10)..(11): Any L- or D-natural amino acid and any non-natural amino acid; see  specification as filed for detail ed description of substitutions, R-groups  and preferred embodiments
  MOD_RES (13)..(13): Any L- or D-natural amino acid and any non-natural amino acid; see  specification as filed for detail ed description of substitutions, R-groups  and preferred embodiments
  MOD_RES (15)..(18): Any L- or D-natural or non-natural amino acid, and this range may     encompass 1 or 4 residues; see specification as filed for detailed  description of substitutions, R-groups and preferred emb
  c-term may be amidated

SEQ ID NO: 954 - protein, 33 aa, Artificial Sequence; identical to SEQ ID NO: 909
  Description of Artificial Sequence: Synthetic peptide
  MOD_RES (2)..(2): Any L- or D-natural amino acid and any non-natural amino acid; see  specification as filed for detail ed description of substitutions, R-groups  and preferred embodiments
  MOD_RES (10)..(11): Any L- or D-natural amino acid and any non-natural amino acid; see  specification as filed for detail ed description of substitutions, R-groups  and preferred embodiments
  MOD_RES (13)..(13): Any L- or D-natural amino acid and any non-natural amino acid; see  specification as filed for detail ed description of substitutions, R-groups  and preferred embodiments
  MOD_RES (15)..(18): Any L- or D-natural or non-natural amino acid, and this range may     encompass 1 or 4 residues; see specification as filed for detailed  description of substitutions, R-groups and preferred emb
  c-term may be amidated

SEQ ID NO: 955 - protein, 33 aa, Artificial Sequence; identical to SEQ ID NO: 910
  Description of Artificial Sequence: Synthetic peptide
  MOD_RES (3)..(3): Any L- or D-natural amino acid and any non-natural amino acid; see  specification as filed for detail ed description of substitutions, R-groups  and preferred embodiments
  MOD_RES (10)..(11): Any L- or D-natural amino acid and any non-natural amino acid; see  specification as filed for detail ed description of substitutions, R-groups  and preferred embodiments
  MOD_RES (13)..(13): Any L- or D-natural amino acid and any non-natural amino acid; see  specification as filed for detail ed description of substitutions, R-groups  and preferred embodiments
  MOD_RES (15)..(18): Any L- or D-natural or non-natural amino acid, and this range may     encompass 1 or 4 residues; see specification as filed for detailed  description of substitutions, R-groups and preferred emb
  c-term may be amidated

SEQ ID NO: 956 - protein, 33 aa, Artificial Sequence; identical to SEQ ID NO: 911
  Description of Artificial Sequence: Synthetic peptide
  MOD_RES (4)..(4): Any L- or D-natural amino acid and any non-natural amino acid; see  specification as filed for detail ed description of substitutions, R-groups  and preferred embodiments
  MOD_RES (10)..(11): Any L- or D-natural amino acid and any non-natural amino acid; see  specification as filed for detail ed description of substitutions, R-groups  and preferred embodiments
  MOD_RES (13)..(13): Any L- or D-natural amino acid and any non-natural amino acid; see  specification as filed for detail ed description of substitutions, R-groups  and preferred embodiments
  MOD_RES (15)..(18): Any L- or D-natural or non-natural amino acid, and this range may     encompass 1 or 4 residues; see specification as filed for detailed  description of substitutions, R-groups and preferred emb
  c-term may be amidated

SEQ ID NO: 957 - protein, 33 aa, Artificial Sequence; identical to SEQ ID NO: 912
  Description of Artificial Sequence: Synthetic peptide
  MOD_RES (5)..(5): Any L- or D-natural amino acid and any non-natural amino acid; see  specification as filed for detail ed description of substitutions, R-groups  and preferred embodiments
  MOD_RES (10)..(11): Any L- or D-natural amino acid and any non-natural amino acid; see  specification as filed for detail ed description of substitutions, R-groups  and preferred embodiments
  MOD_RES (13)..(13): Any L- or D-natural amino acid and any non-natural amino acid; see  specification as filed for detail ed description of substitutions, R-groups  and preferred embodiments
  MOD_RES (15)..(18): Any L- or D-natural or non-natural amino acid, and this range may     encompass 1 or 4 residues; see specification as filed for detailed  description of substitutions, R-groups and preferred emb
  c-term may be amidated

SEQ ID NO: 958 - protein, 33 aa, Artificial Sequence; identical to SEQ ID NO: 913
  Description of Artificial Sequence: Synthetic peptide
  MOD_RES (6)..(6): Any L- or D-natural amino acid and any non-natural amino acid; see  specification as filed for detail ed description of substitutions, R-groups  and preferred embodiments
  MOD_RES (10)..(11): Any L- or D-natural amino acid and any non-natural amino acid; see  specification as filed for detail ed description of substitutions, R-groups  and preferred embodiments
  MOD_RES (13)..(13): Any L- or D-natural amino acid and any non-natural amino acid; see  specification as filed for detail ed description of substitutions, R-groups  and preferred embodiments
  MOD_RES (15)..(18): Any L- or D-natural or non-natural amino acid, and this range may     encompass 1 or 4 residues; see specification as filed for detailed  description of substitutions, R-groups and preferred emb
  c-term may be amidated

SEQ ID NO: 959 - protein, 33 aa, Artificial Sequence; identical to SEQ ID NO: 914
  Description of Artificial Sequence: Synthetic peptide
  MOD_RES (7)..(7): Any L- or D-natural amino acid and any non-natural amino acid; see  specification as filed for detail ed description of substitutions, R-groups  and preferred embodiments
  MOD_RES (10)..(11): Any L- or D-natural amino acid and any non-natural amino acid; see  specification as filed for detail ed description of substitutions, R-groups  and preferred embodiments
  MOD_RES (13)..(13): Any L- or D-natural amino acid and any non-natural amino acid; see  specification as filed for detail ed description of substitutions, R-groups  and preferred embodiments
  MOD_RES (15)..(18): Any L- or D-natural or non-natural amino acid, and this range may     encompass 1 or 4 residues; see specification as filed for detailed  description of substitutions, R-groups and preferred emb
  c-term may be amidated

SEQ ID NO: 960 - protein, 33 aa, Artificial Sequence; identical to SEQ ID NO: 915
  Description of Artificial Sequence: Synthetic peptide
  MOD_RES (8)..(8): Any L- or D-natural amino acid and any non-natural amino acid; see  specification as filed for detail ed description of substitutions, R-groups  and preferred embodiments
  MOD_RES (10)..(11): Any L- or D-natural amino acid and any non-natural amino acid; see  specification as filed for detail ed description of substitutions, R-groups  and preferred embodiments
  MOD_RES (13)..(13): Any L- or D-natural amino acid and any non-natural amino acid; see  specification as filed for detail ed description of substitutions, R-groups  and preferred embodiments
  MOD_RES (15)..(18): Any L- or D-natural or non-natural amino acid, and this range may     encompass 1 or 4 residues; see specification as filed for detailed  description of substitutions, R-groups and preferred emb
  c-term may be amidated

SEQ ID NO: 961 - protein, 33 aa, Artificial Sequence; identical to SEQ ID NO: 916
  Description of Artificial Sequence: Synthetic peptide
  MOD_RES (9)..(11): Any L- or D-natural amino acid and any non-natural amino acid; see  specification as filed for detail ed description of substitutions, R-groups  and preferred embodiments
  MOD_RES (13)..(13): Any L- or D-natural amino acid and any non-natural amino acid; see  specification as filed for detail ed description of substitutions, R-groups  and preferred embodiments
  MOD_RES (15)..(18): Any L- or D-natural or non-natural amino acid, and this range may     encompass 1 or 4 residues; see specification as filed for detailed  description of substitutions, R-groups and preferred emb
  c-term may be amidated

SEQ ID NO: 962 - protein, 33 aa, Artificial Sequence; identical to SEQ ID NO: 917
  Description of Artificial Sequence: Synthetic peptide
  MOD_RES (14)..(14): Any L- or D-natural amino acid and any non-natural amino acid; see  specification as filed for detail ed description of substitutions, R-groups  and preferred embodiments
  MOD_RES (15)..(18): Any L- or D-natural or non-natural amino acid, and this range may     encompass 1 or 4 residues; see specification as filed for detailed  description of substitutions, R-groups and preferred emb
  c-term may be amidated

SEQ ID NO: 963 - protein, 33 aa, Artificial Sequence; identical to SEQ ID NO: 918
  Description of Artificial Sequence: Synthetic peptide
  MOD_RES (1)..(1): Any L- or D-natural amino acid and any non-natural amino acid; see  specification as filed for detail ed description of substitutions, R-groups  and preferred embodiments
  MOD_RES (10)..(11): Any L- or D-natural amino acid and any non-natural amino acid; see  specification as filed for detail ed description of substitutions, R-groups  and preferred embodiments
  MOD_RES (14)..(14): Any L- or D-natural amino acid and any non-natural amino acid; see  specification as filed for detail ed description of substitutions, R-groups  and preferred embodiments
  MOD_RES (15)..(18): Any L- or D-natural or non-natural amino acid, and this range may     encompass 1 or 4 residues; see specification as filed for detailed  description of substitutions, R-groups and preferred emb
  c-term may be amidated

SEQ ID NO: 964 - protein, 33 aa, Artificial Sequence; identical to SEQ ID NO: 919
  Description of Artificial Sequence: Synthetic peptide
  MOD_RES (2)..(2): Any L- or D-natural amino acid and any non-natural amino acid; see  specification as filed for detail ed description of substitutions, R-groups  and preferred embodiments
  MOD_RES (10)..(11): Any L- or D-natural amino acid and any non-natural amino acid; see  specification as filed for detail ed description of substitutions, R-groups  and preferred embodiments
  MOD_RES (14)..(14): Any L- or D-natural amino acid and any non-natural amino acid; see  specification as filed for detail ed description of substitutions, R-groups  and preferred embodiments
  MOD_RES (15)..(18): Any L- or D-natural or non-natural amino acid, and this range may     encompass 1 or 4 residues; see specification as filed for detailed  description of substitutions, R-groups and preferred emb
  c-term may be amidated

SEQ ID NO: 965 - protein, 33 aa, Artificial Sequence; identical to SEQ ID NO: 920
  Description of Artificial Sequence: Synthetic peptide
  MOD_RES (3)..(3): Any L- or D-natural amino acid and any non-natural amino acid; see  specification as filed for detail ed description of substitutions, R-groups  and preferred embodiments
  MOD_RES (10)..(11): Any L- or D-natural amino acid and any non-natural amino acid; see  specification as filed for detail ed description of substitutions, R-groups  and preferred embodiments
  MOD_RES (14)..(14): Any L- or D-natural amino acid and any non-natural amino acid; see  specification as filed for detail ed description of substitutions, R-groups  and preferred embodiments
  MOD_RES (15)..(18): Any L- or D-natural or non-natural amino acid, and this range may     encompass 1 or 4 residues; see specification as filed for detailed  description of substitutions, R-groups and preferred emb
  c-term may be amidated

SEQ ID NO: 966 - protein, 33 aa, Artificial Sequence; identical to SEQ ID NO: 921
  Description of Artificial Sequence: Synthetic peptide
  MOD_RES (4)..(4): Any L- or D-natural amino acid and any non-natural amino acid; see  specification as filed for detail ed description of substitutions, R-groups  and preferred embodiments
  MOD_RES (10)..(11): Any L- or D-natural amino acid and any non-natural amino acid; see  specification as filed for detail ed description of substitutions, R-groups  and preferred embodiments
  MOD_RES (14)..(14): Any L- or D-natural amino acid and any non-natural amino acid; see  specification as filed for detail ed description of substitutions, R-groups  and preferred embodiments
  MOD_RES (15)..(18): Any L- or D-natural or non-natural amino acid, and this range may     encompass 1 or 4 residues; see specification as filed for detailed  description of substitutions, R-groups and preferred emb
  c-term may be amidated

SEQ ID NO: 967 - protein, 33 aa, Artificial Sequence; identical to SEQ ID NO: 922
  Description of Artificial Sequence: Synthetic peptide
  MOD_RES (5)..(5): Any L- or D-natural amino acid and any non-natural amino acid; see  specification as filed for detail ed description of substitutions, R-groups  and preferred embodiments
  MOD_RES (10)..(11): Any L- or D-natural amino acid and any non-natural amino acid; see  specification as filed for detail ed description of substitutions, R-groups  and preferred embodiments
  MOD_RES (14)..(14): Any L- or D-natural amino acid and any non-natural amino acid; see  specification as filed for detail ed description of substitutions, R-groups  and preferred embodiments
  MOD_RES (15)..(18): Any L- or D-natural or non-natural amino acid, and this range may     encompass 1 or 4 residues; see specification as filed for detailed  description of substitutions, R-groups and preferred emb
  c-term may be amidated

SEQ ID NO: 968 - protein, 33 aa, Artificial Sequence; identical to SEQ ID NO: 923
  Description of Artificial Sequence: Synthetic peptide
  MOD_RES (6)..(6): Any L- or D-natural amino acid and any non-natural amino acid; see  specification as filed for detail ed description of substitutions, R-groups  and preferred embodiments
  MOD_RES (10)..(11): Any L- or D-natural amino acid and any non-natural amino acid; see  specification as filed for detail ed description of substitutions, R-groups  and preferred embodiments
  MOD_RES (14)..(14): Any L- or D-natural amino acid and any non-natural amino acid; see  specification as filed for detail ed description of substitutions, R-groups  and preferred embodiments
  MOD_RES (15)..(18): Any L- or D-natural or non-natural amino acid, and this range may     encompass 1 or 4 residues; see specification as filed for detailed  description of substitutions, R-groups and preferred emb
  c-term may be amidated

SEQ ID NO: 969 - protein, 33 aa, Artificial Sequence; identical to SEQ ID NO: 924
  Description of Artificial Sequence: Synthetic peptide
  MOD_RES (7)..(7): Any L- or D-natural amino acid and any non-natural amino acid; see  specification as filed for detail ed description of substitutions, R-groups  and preferred embodiments
  MOD_RES (10)..(11): Any L- or D-natural amino acid and any non-natural amino acid; see  specification as filed for detail ed description of substitutions, R-groups  and preferred embodiments
  MOD_RES (14)..(14): Any L- or D-natural amino acid and any non-natural amino acid; see  specification as filed for detail ed description of substitutions, R-groups  and preferred embodiments
  MOD_RES (15)..(18): Any L- or D-natural or non-natural amino acid, and this range may     encompass 1 or 4 residues; see specification as filed for detailed  description of substitutions, R-groups and preferred emb
  c-term may be amidated

SEQ ID NO: 970 - protein, 33 aa, Artificial Sequence; identical to SEQ ID NO: 925
  Description of Artificial Sequence: Synthetic peptide
  MOD_RES (8)..(8): Any L- or D-natural amino acid and any non-natural amino acid; see  specification as filed for detail ed description of substitutions, R-groups  and preferred embodiments
  MOD_RES (10)..(11): Any L- or D-natural amino acid and any non-natural amino acid; see  specification as filed for detail ed description of substitutions, R-groups  and preferred embodiments
  MOD_RES (14)..(14): Any L- or D-natural amino acid and any non-natural amino acid; see  specification as filed for detail ed description of substitutions, R-groups  and preferred embodiments
  MOD_RES (15)..(18): Any L- or D-natural or non-natural amino acid, and this range may     encompass 1 or 4 residues; see specification as filed for detailed  description of substitutions, R-groups and preferred emb
  c-term may be amidated

SEQ ID NO: 971 - protein, 33 aa, Artificial Sequence; identical to SEQ ID NO: 926
  Description of Artificial Sequence: Synthetic peptide
  MOD_RES (9)..(11): Any L- or D-natural amino acid and any non-natural amino acid; see  specification as filed for detail ed description of substitutions, R-groups  and preferred embodiments
  MOD_RES (14)..(14): Any L- or D-natural amino acid and any non-natural amino acid; see  specification as filed for detail ed description of substitutions, R-groups  and preferred embodiments
  MOD_RES (15)..(18): Any L- or D-natural or non-natural amino acid, and this range may     encompass 1 or 4 residues; see specification as filed for detailed  description of substitutions, R-groups and preferred emb
  c-term may be amidated

SEQ ID NO: 972 - protein, 10 aa, Artificial Sequence
  Description of Artificial Sequence: Synthetic peptide
  c-term may be amidated
KSMQVPFSRA

SEQ ID NO: 973 - protein, 15 aa, Artificial Sequence
  Description of Artificial Sequence: Synthetic peptide
  c-term may be amidated
AFSFAEQEIPLRAIL

SEQ ID NO: 974 - protein, 23 aa, Artificial Sequence
  Description of Artificial Sequence: Synthetic peptide
  c-term may be amidated
AFSFAEQEIPLRAILCYRNTSSI

SEQ ID NO: 975 - protein, 24 aa, Artificial Sequence
  Description of Artificial Sequence: Synthetic peptide
  c-term may be amidated
AYRNTSSICSNEGLIFKLKRGKEA

SEQ ID NO: 976 - protein, 25 aa, Artificial Sequence
  Description of Artificial Sequence: Synthetic peptide
  c-term may be amidated
KSMQVPFSRCCFSFAEQEIPLRAIL

SEQ ID NO: 977 - protein, 25 aa, Artificial Sequence
  Description of Artificial Sequence: Synthetic peptide
  MOD_RES (10)..(11): Any L- or D-natural amino acid and any non-natural amino acid; see  specification as filed for detail ed description of substitutions, R-groups  and preferred embodiments
  c-term may be amidated
KSMQVPFSRXXFSFAEQEIPLRAIL

SEQ ID NO: 978 - protein, 25 aa, Artificial Sequence
  Description of Artificial Sequence: Synthetic peptide
  MOD_RES (1)..(1): Any L- or D-natural amino acid and any non-natural amino acid; see  specification as filed for detail ed description of substitutions, R-groups  and preferred embodiments
  MOD_RES (10)..(11): Any L- or D-natural amino acid and any non-natural amino acid; see  specification as filed for detail ed description of substitutions, R-groups  and preferred embodiments
  c-term may be amidated
XSMQVPFSRXXFSFAEQEIPLRAIL

SEQ ID NO: 979 - protein, 25 aa, Artificial Sequence
  Description of Artificial Sequence: Synthetic peptide
  MOD_RES (2)..(2): Any L- or D-natural amino acid and any non-natural amino acid; see  specification as filed for detail ed description of substitutions, R-groups  and preferred embodiments
  MOD_RES (10)..(11): Any L- or D-natural amino acid and any non-natural amino acid; see  specification as filed for detail ed description of substitutions, R-groups  and preferred embodiments
  c-term may be amidated
KXMQVPFSRXXFSFAEQEIPLRAIL

SEQ ID NO: 980 - protein, 25 aa, Artificial Sequence
  Description of Artificial Sequence: Synthetic peptide
  MOD_RES (3)..(3): Any L- or D-natural amino acid and any non-natural amino acid; see  specification as filed for detail ed description of substitutions, R-groups  and preferred embodiments
  MOD_RES (10)..(11): Any L- or D-natural amino acid and any non-natural amino acid; see  specification as filed for detail ed description of substitutions, R-groups  and preferred embodiments
  c-term may be amidated
KSXQVPFSRXXFSFAEQEIPLRAIL

SEQ ID NO: 981 - protein, 25 aa, Artificial Sequence
  Description of Artificial Sequence: Synthetic peptide
  MOD_RES (4)..(4): Any L- or D-natural amino acid and any non-natural amino acid; see  specification as filed for detail ed description of substitutions, R-groups  and preferred embodiments
  MOD_RES (10)..(11): Any L- or D-natural amino acid and any non-natural amino acid; see  specification as filed for detail ed description of substitutions, R-groups  and preferred embodiments
  c-term may be amidated
KSMXVPFSRXXFSFAEQEIPLRAIL

SEQ ID NO: 982 - protein, 25 aa, Artificial Sequence
  Description of Artificial Sequence: Synthetic peptide
  MOD_RES (5)..(5): Any L- or D-natural amino acid and any non-natural amino acid; see  specification as filed for detail ed description of substitutions, R-groups  and preferred embodiments
  MOD_RES (10)..(11): Any L- or D-natural amino acid and any non-natural amino acid; see  specification as filed for detail ed description of substitutions, R-groups  and preferred embodiments
  c-term may be amidated
KSMQXPFSRXXFSFAEQEIPLRAIL

SEQ ID NO: 983 - protein, 25 aa, Artificial Sequence
  Description of Artificial Sequence: Synthetic peptide
  MOD_RES (6)..(6): Any L- or D-natural amino acid and any non-natural amino acid; see  specification as filed for detail ed description of substitutions, R-groups  and preferred embodiments
  MOD_RES (10)..(11): Any L- or D-natural amino acid and any non-natural amino acid; see  specification as filed for detail ed description of substitutions, R-groups  and preferred embodiments
  c-term may be amidated
KSMQVXFSRXXFSFAEQEIPLRAIL

SEQ ID NO: 984 - protein, 25 aa, Artificial Sequence
  Description of Artificial Sequence: Synthetic peptide
  MOD_RES (7)..(7): Any L- or D-natural amino acid and any non-natural amino acid; see  specification as filed for detail ed description of substitutions, R-groups  and preferred embodiments
  MOD_RES (10)..(11): Any L- or D-natural amino acid and any non-natural amino acid; see  specification as filed for detail ed description of substitutions, R-groups  and preferred embodiments
  c-term may be amidated
KSMQVPXSRXXFSFAEQEIPLRAIL

SEQ ID NO: 985 - protein, 25 aa, Artificial Sequence
  Description of Artificial Sequence: Synthetic peptide
  MOD_RES (8)..(8): Any L- or D-natural amino acid and any non-natural amino acid; see  specification as filed for detail ed description of substitutions, R-groups  and preferred embodiments
  MOD_RES (10)..(11): Any L- or D-natural amino acid and any non-natural amino acid; see  specification as filed for detail ed description of substitutions, R-groups  and preferred embodiments
  c-term may be amidated
KSMQVPFXRXXFSFAEQEIPLRAIL

SEQ ID NO: 986 - protein, 25 aa, Artificial Sequence
  Description of Artificial Sequence: Synthetic peptide
  MOD_RES (9)..(11): Any L- or D-natural amino acid and any non-natural amino acid; see  specification as filed for detail ed description of substitutions, R-groups  and preferred embodiments
  c-term may be amidated
KSMQVPFSXXXFSFAEQEIPLRAIL

SEQ ID NO: 987 - protein, 34 aa, Artificial Sequence
  Description of Artificial Sequence: Synthetic peptide
  c-term may be amidated
ASNEGLIFKLKRGKEACALDTVGWVQRHRKMLRH

SEQ ID NO: 988 - protein, 24 aa, Artificial Sequence
  Description of Artificial Sequence: Synthetic peptide
  c-term may be amidated
AALDTVGWVQRHRKMLRHCPSKRK

SEQ ID NO: 989 - protein, 31 aa, Artificial Sequence
  Description of Artificial Sequence: Synthetic peptide
  MOD_RES (15)..(18): Any L- or D-natural or non-natural amino acid, and this range may     encompass 1 or 4 residues; see specification as filed for detailed  description of substitutions, R-groups and preferred emb
  c-term may be amidated
KSMQVPFSRCCFSFXXXXTVGWVQRHRKMLR

SEQ ID NO: 990 - protein, 31 aa, Artificial Sequence
  Description of Artificial Sequence: Synthetic peptide
  MOD_RES (10)..(11): Any L- or D-natural amino acid and any non-natural amino acid; see  specification as filed for detail ed description of substitutions, R-groups  and preferred embodiments
  MOD_RES (15)..(18): Any L- or D-natural or non-natural amino acid, and this range may     encompass 1 or 4 residues; see specification as filed for detailed  description of substitutions, R-groups and preferred emb
  c-term may be amidated
KSMQVPFSRXXFSFXXXXTVGWVQRHRKMLR

SEQ ID NO: 991 - protein, 31 aa, Artificial Sequence
  Description of Artificial Sequence: Synthetic peptide
  MOD_RES (1)..(1): Any L- or D-natural amino acid and any non-natural amino acid; see  specification as filed for detail ed description of substitutions, R-groups  and preferred embodiments
  MOD_RES (10)..(11): Any L- or D-natural amino acid and any non-natural amino acid; see  specification as filed for detail ed description of substitutions, R-groups  and preferred embodiments
  MOD_RES (15)..(18): Any L- or D-natural or non-natural amino acid, and this range may     encompass 1 or 4 residues; see specification as filed for detailed  description of substitutions, R-groups and preferred emb
  c-term may be amidated
XSMQVPFSRXXFSFXXXXTVGWVQRHRKMLR

SEQ ID NO: 992 - protein, 31 aa, Artificial Sequence
  Description of Artificial Sequence: Synthetic peptide
  MOD_RES (2)..(2): Any L- or D-natural amino acid and any non-natural amino acid; see  specification as filed for detail ed description of substitutions, R-groups  and preferred embodiments
  MOD_RES (10)..(11): Any L- or D-natural amino acid and any non-natural amino acid; see  specification as filed for detail ed description of substitutions, R-groups  and preferred embodiments
  MOD_RES (15)..(18): Any L- or D-natural or non-natural amino acid, and this range may     encompass 1 or 4 residues; see specification as filed for detailed  description of substitutions, R-groups and preferred emb
  c-term may be amidated
KXMQVPFSRXXFSFXXXXTVGWVQRHRKMLR

SEQ ID NO: 993 - protein, 31 aa, Artificial Sequence
  Description of Artificial Sequence: Synthetic peptide
  MOD_RES (3)..(3): Any L- or D-natural amino acid and any non-natural amino acid; see  specification as filed for detail ed description of substitutions, R-groups  and preferred embodiments
  MOD_RES (10)..(11): Any L- or D-natural amino acid and any non-natural amino acid; see  specification as filed for detail ed description of substitutions, R-groups  and preferred embodiments
  MOD_RES (15)..(18): Any L- or D-natural or non-natural amino acid, and this range may     encompass 1 or 4 residues; see specification as filed for detailed  description of substitutions, R-groups and preferred emb
  c-term may be amidated
KSXQVPFSRXXFSFXXXXTVGWVQRHRKMLR

SEQ ID NO: 994 - protein, 31 aa, Artificial Sequence
  Description of Artificial Sequence: Synthetic peptide
  MOD_RES (4)..(4): Any L- or D-natural amino acid and any non-natural amino acid; see  specification as filed for detail ed description of substitutions, R-groups  and preferred embodiments
  MOD_RES (10)..(11): Any L- or D-natural amino acid and any non-natural amino acid; see  specification as filed for detail ed description of substitutions, R-groups  and preferred embodiments
  MOD_RES (15)..(18): Any L- or D-natural or non-natural amino acid, and this range may     encompass 1 or 4 residues; see specification as filed for detailed  description of substitutions, R-groups and preferred emb
  c-term may be amidated
KSMXVPFSRXXFSFXXXXTVGWVQRHRKMLR

SEQ ID NO: 995 - protein, 31 aa, Artificial Sequence
  Description of Artificial Sequence: Synthetic peptide
  MOD_RES (5)..(5): Any L- or D-natural amino acid and any non-natural amino acid; see  specification as filed for detail ed description of substitutions, R-groups  and preferred embodiments
  MOD_RES (10)..(11): Any L- or D-natural amino acid and any non-natural amino acid; see  specification as filed for detail ed description of substitutions, R-groups  and preferred embodiments
  MOD_RES (15)..(18): Any L- or D-natural or non-natural amino acid, and this range may     encompass 1 or 4 residues; see specification as filed for detailed  description of substitutions, R-groups and preferred emb
  c-term may be amidated
KSMQXPFSRXXFSFXXXXTVGWVQRHRKMLR

SEQ ID NO: 996 - protein, 31 aa, Artificial Sequence
  Description of Artificial Sequence: Synthetic peptide
  MOD_RES (6)..(6): Any L- or D-natural amino acid and any non-natural amino acid; see  specification as filed for detail ed description of substitutions, R-groups  and preferred embodiments
  MOD_RES (10)..(11): Any L- or D-natural amino acid and any non-natural amino acid; see  specification as filed for detail ed description of substitutions, R-groups  and preferred embodiments
  MOD_RES (15)..(18): Any L- or D-natural or non-natural amino acid, and this range may     encompass 1 or 4 residues; see specification as filed for detailed  description of substitutions, R-groups and preferred emb
  c-term may be amidated
KSMQVXFSRXXFSFXXXXTVGWVQRHRKMLR

SEQ ID NO: 997 - protein, 31 aa, Artificial Sequence
  Description of Artificial Sequence: Synthetic peptide
  MOD_RES (7)..(7): Any L- or D-natural amino acid and any non-natural amino acid; see  specification as filed for detail ed description of substitutions, R-groups  and preferred embodiments
  MOD_RES (10)..(11): Any L- or D-natural amino acid and any non-natural amino acid; see  specification as filed for detail ed description of substitutions, R-groups  and preferred embodiments
  MOD_RES (15)..(18): Any L- or D-natural or non-natural amino acid, and this range may     encompass 1 or 4 residues; see specification as filed for detailed  description of substitutions, R-groups and preferred emb
  c-term may be amidated
KSMQVPXSRXXFSFXXXXTVGWVQRHRKMLR

SEQ ID NO: 998 - protein, 31 aa, Artificial Sequence
  Description of Artificial Sequence: Synthetic peptide
  MOD_RES (8)..(8): Any L- or D-natural amino acid and any non-natural amino acid; see  specification as filed for detail ed description of substitutions, R-groups  and preferred embodiments
  MOD_RES (10)..(11): Any L- or D-natural amino acid and any non-natural amino acid; see  specification as filed for detail ed description of substitutions, R-groups  and preferred embodiments
  MOD_RES (15)..(18): Any L- or D-natural or non-natural amino acid, and this range may     encompass 1 or 4 residues; see specification as filed for detailed  description of substitutions, R-groups and preferred emb
  c-term may be amidated
KSMQVPFXRXXFSFXXXXTVGWVQRHRKMLR

SEQ ID NO: 999 - protein, 31 aa, Artificial Sequence
  Description of Artificial Sequence: Synthetic peptide
  MOD_RES (9)..(11): Any L- or D-natural amino acid and any non-natural amino acid; see  specification as filed for detail ed description of substitutions, R-groups  and preferred embodiments
  MOD_RES (15)..(18): Any L- or D-natural or non-natural amino acid, and this range may     encompass 1 or 4 residues; see specification as filed for detailed  description of substitutions, R-groups and preferred emb
  c-term may be amidated
KSMQVPFSXXXFSFXXXXTVGWVQRHRKMLR

SEQ ID NO: 1000 - protein, 31 aa, Artificial Sequence
  Description of Artificial Sequence: Synthetic peptide
  MOD_RES (12)..(12): Any L- or D-natural amino acid and any non-natural amino acid; see  specification as filed for detail ed description of substitutions, R-groups  and preferred embodiments
  MOD_RES (15)..(18): Any L- or D-natural or non-natural amino acid, and this range may     encompass 1 or 4 residues; see specification as filed for detailed  description of substitutions, R-groups and preferred emb
  c-term may be amidated
KSMQVPFSRCCXSFXXXXTVGWVQRHRKMLR

SEQ ID NO: 1001 - protein, 31 aa, Artificial Sequence
  Description of Artificial Sequence: Synthetic peptide
  MOD_RES (10)..(12): Any L- or D-natural amino acid and any non-natural amino acid; see  specification as filed for detail ed description of substitutions, R-groups  and preferred embodiments
  MOD_RES (15)..(18): Any L- or D-natural or non-natural amino acid, and this range may     encompass 1 or 4 residues; see specification as filed for detailed  description of substitutions, R-groups and preferred emb
  c-term may be amidated
KSMQVPFSRXXXSFXXXXTVGWVQRHRKMLR

SEQ ID NO: 1002 - protein, 31 aa, Artificial Sequence
  Description of Artificial Sequence: Synthetic peptide
  MOD_RES (1)..(1): Any L- or D-natural amino acid and any non-natural amino acid; see  specification as filed for detail ed description of substitutions, R-groups  and preferred embodiments
  MOD_RES (10)..(12): Any L- or D-natural amino acid and any non-natural amino acid; see  specification as filed for detail ed description of substitutions, R-groups  and preferred embodiments
  MOD_RES (15)..(18): Any L- or D-natural or non-natural amino acid, and this range may     encompass 1 or 4 residues; see specification as filed for detailed  description of substitutions, R-groups and preferred emb
  c-term may be amidated
XSMQVPFSRXXXSFXXXXTVGWVQRHRKMLR

SEQ ID NO: 1003 - protein, 31 aa, Artificial Sequence
  Description of Artificial Sequence: Synthetic peptide
  MOD_RES (2)..(2): Any L- or D-natural amino acid and any non-natural amino acid; see  specification as filed for detail ed description of substitutions, R-groups  and preferred embodiments
  MOD_RES (10)..(12): Any L- or D-natural amino acid and any non-natural amino acid; see  specification as filed for detail ed description of substitutions, R-groups  and preferred embodiments
  MOD_RES (15)..(18): Any L- or D-natural or non-natural amino acid, and this range may     encompass 1 or 4 residues; see specification as filed for detailed  description of substitutions, R-groups and preferred emb
  c-term may be amidated
KXMQVPFSRXXXSFXXXXTVGWVQRHRKMLR

SEQ ID NO: 1004 - protein, 31 aa, Artificial Sequence
  Description of Artificial Sequence: Synthetic peptide
  MOD_RES (3)..(3): Any L- or D-natural amino acid and any non-natural amino acid; see  specification as filed for detail ed description of substitutions, R-groups  and preferred embodiments
  MOD_RES (10)..(12): Any L- or D-natural amino acid and any non-natural amino acid; see  specification as filed for detail ed description of substitutions, R-groups  and preferred embodiments
  MOD_RES (15)..(18): Any L- or D-natural or non-natural amino acid, and this range may     encompass 1 or 4 residues; see specification as filed for detailed  description of substitutions, R-groups and preferred emb
  c-term may be amidated
KSXQVPFSRXXXSFXXXXTVGWVQRHRKMLR

SEQ ID NO: 1005 - protein, 31 aa, Artificial Sequence
  Description of Artificial Sequence: Synthetic peptide
  MOD_RES (4)..(4): Any L- or D-natural amino acid and any non-natural amino acid; see  specification as filed for detail ed description of substitutions, R-groups  and preferred embodiments
  MOD_RES (10)..(12): Any L- or D-natural amino acid and any non-natural amino acid; see  specification as filed for detail ed description of substitutions, R-groups  and preferred embodiments
  MOD_RES (15)..(18): Any L- or D-natural or non-natural amino acid, and this range may     encompass 1 or 4 residues; see specification as filed for detailed  description of substitutions, R-groups and preferred emb
  c-term may be amidated
KSMXVPFSRXXXSFXXXXTVGWVQRHRKMLR

SEQ ID NO: 1006 - protein, 31 aa, Artificial Sequence
  Description of Artificial Sequence: Synthetic peptide
  MOD_RES (5)..(5): Any L- or D-natural amino acid and any non-natural amino acid; see  specification as filed for detail ed description of substitutions, R-groups  and preferred embodiments
  MOD_RES (10)..(12): Any L- or D-natural amino acid and any non-natural amino acid; see  specification as filed for detail ed description of substitutions, R-groups  and preferred embodiments
  MOD_RES (15)..(18): Any L- or D-natural or non-natural amino acid, and this range may     encompass 1 or 4 residues; see specification as filed for detailed  description of substitutions, R-groups and preferred emb
  c-term may be amidated
KSMQXPFSRXXXSFXXXXTVGWVQRHRKMLR

SEQ ID NO: 1007 - protein, 31 aa, Artificial Sequence
  Description of Artificial Sequence: Synthetic peptide
  MOD_RES (6)..(6): Any L- or D-natural amino acid and any non-natural amino acid; see  specification as filed for detail ed description of substitutions, R-groups  and preferred embodiments
  MOD_RES (10)..(12): Any L- or D-natural amino acid and any non-natural amino acid; see  specification as filed for detail ed description of substitutions, R-groups  and preferred embodiments
  MOD_RES (15)..(18): Any L- or D-natural or non-natural amino acid, and this range may     encompass 1 or 4 residues; see specification as filed for detailed  description of substitutions, R-groups and preferred emb
  c-term may be amidated
KSMQVXFSRXXXSFXXXXTVGWVQRHRKMLR

SEQ ID NO: 1008 - protein, 31 aa, Artificial Sequence
  Description of Artificial Sequence: Synthetic peptide
  MOD_RES (7)..(7): Any L- or D-natural amino acid and any non-natural amino acid; see  specification as filed for detail ed description of substitutions, R-groups  and preferred embodiments
  MOD_RES (10)..(12): Any L- or D-natural amino acid and any non-natural amino acid; see  specification as filed for detail ed description of substitutions, R-groups  and preferred embodiments
  MOD_RES (15)..(18): Any L- or D-natural or non-natural amino acid, and this range may     encompass 1 or 4 residues; see specification as filed for detailed  description of substitutions, R-groups and preferred emb
  c-term may be amidated
KSMQVPXSRXXXSFXXXXTVGWVQRHRKMLR

SEQ ID NO: 1009 - protein, 31 aa, Artificial Sequence
  Description of Artificial Sequence: Synthetic peptide
  MOD_RES (8)..(8): Any L- or D-natural amino acid and any non-natural amino acid; see  specification as filed for detail ed description of substitutions, R-groups  and preferred embodiments
  MOD_RES (10)..(12): Any L- or D-natural amino acid and any non-natural amino acid; see  specification as filed for detail ed description of substitutions, R-groups  and preferred embodiments
  MOD_RES (15)..(18): Any L- or D-natural or non-natural amino acid, and this range may     encompass 1 or 4 residues; see specification as filed for detailed  description of substitutions, R-groups and preferred emb
  c-term may be amidated
KSMQVPFXRXXXSFXXXXTVGWVQRHRKMLR

SEQ ID NO: 1010 - protein, 31 aa, Artificial Sequence
  Description of Artificial Sequence: Synthetic peptide
  MOD_RES (9)..(12): Any L- or D-natural amino acid and any non-natural amino acid; see  specification as filed for detail ed description of substitutions, R-groups  and preferred embodiments
  MOD_RES (15)..(18): Any L- or D-natural or non-natural amino acid, and this range may     encompass 1 or 4 residues; see specification as filed for detailed  description of substitutions, R-groups and preferred emb
  c-term may be amidated
KSMQVPFSXXXXSFXXXXTVGWVQRHRKMLR

SEQ ID NO: 1011 - protein, 31 aa, Artificial Sequence
  Description of Artificial Sequence: Synthetic peptide
  MOD_RES (13)..(13): Any L- or D-natural amino acid and any non-natural amino acid; see  specification as filed for detail ed description of substitutions, R-groups  and preferred embodiments
  MOD_RES (15)..(18): Any L- or D-natural or non-natural amino acid, and this range may     encompass 1 or 4 residues; see specification as filed for detailed  description of substitutions, R-groups and preferred emb
  c-term may be amidated
KSMQVPFSRCCFXFXXXXTVGWVQRHRKMLR

SEQ ID NO: 1012 - protein, 31 aa, Artificial Sequence
  Description of Artificial Sequence: Synthetic peptide
  MOD_RES (10)..(11): Any L- or D-natural amino acid and any non-natural amino acid; see  specification as filed for detail ed description of substitutions, R-groups  and preferred embodiments
  MOD_RES (13)..(13): Any L- or D-natural amino acid and any non-natural amino acid; see  specification as filed for detail ed description of substitutions, R-groups  and preferred embodiments
  MOD_RES (15)..(18): Any L- or D-natural or non-natural amino acid, and this range may     encompass 1 or 4 residues; see specification as filed for detailed  description of substitutions, R-groups and preferred emb
  c-term may be amidated
KSMQVPFSRXXFXFXXXXTVGWVQRHRKMLR

SEQ ID NO: 1013 - protein, 31 aa, Artificial Sequence
  Description of Artificial Sequence: Synthetic peptide
  MOD_RES (1)..(1): Any L- or D-natural amino acid and any non-natural amino acid; see  specification as filed for detail ed description of substitutions, R-groups  and preferred embodiments
  MOD_RES (10)..(11): Any L- or D-natural amino acid and any non-natural amino acid; see  specification as filed for detail ed description of substitutions, R-groups  and preferred embodiments
  MOD_RES (13)..(13): Any L- or D-natural amino acid and any non-natural amino acid; see  specification as filed for detail ed description of substitutions, R-groups  and preferred embodiments
  MOD_RES (15)..(18): Any L- or D-natural or non-natural amino acid, and this range may     encompass 1 or 4 residues; see specification as filed for detailed  description of substitutions, R-groups and preferred emb
  c-term may be amidated
XSMQVPFSRXXFXFXXXXTVGWVQRHRKMLR

SEQ ID NO: 1014 - protein, 31 aa, Artificial Sequence
  Description of Artificial Sequence: Synthetic peptide
  MOD_RES (2)..(2): Any L- or D-natural amino acid and any non-natural amino acid; see  specification as filed for detail ed description of substitutions, R-groups  and preferred embodiments
  MOD_RES (10)..(11): Any L- or D-natural amino acid and any non-natural amino acid; see  specification as filed for detail ed description of substitutions, R-groups  and preferred embodiments
  MOD_RES (13)..(13): Any L- or D-natural amino acid and any non-natural amino acid; see  specification as filed for detail ed description of substitutions, R-groups  and preferred embodiments
  MOD_RES (15)..(18): Any L- or D-natural or non-natural amino acid, and this range may     encompass 1 or 4 residues; see specification as filed for detailed  description of substitutions, R-groups and preferred emb
  c-term may be amidated
KXMQVPFSRXXFXFXXXXTVGWVQRHRKMLR

SEQ ID NO: 1015 - protein, 31 aa, Artificial Sequence
  Description of Artificial Sequence: Synthetic peptide
  MOD_RES (3)..(3): Any L- or D-natural amino acid and any non-natural amino acid; see  specification as filed for detail ed description of substitutions, R-groups  and preferred embodiments
  MOD_RES (10)..(11): Any L- or D-natural amino acid and any non-natural amino acid; see  specification as filed for detail ed description of substitutions, R-groups  and preferred embodiments
  MOD_RES (13)..(13): Any L- or D-natural amino acid and any non-natural amino acid; see  specification as filed for detail ed description of substitutions, R-groups  and preferred embodiments
  MOD_RES (15)..(18): Any L- or D-natural or non-natural amino acid, and this range may     encompass 1 or 4 residues; see specification as filed for detailed  description of substitutions, R-groups and preferred emb
  c-term may be amidated
KSXQVPFSRXXFXFXXXXTVGWVQRHRKMLR

SEQ ID NO: 1016 - protein, 31 aa, Artificial Sequence
  Description of Artificial Sequence: Synthetic peptide
  MOD_RES (4)..(4): Any L- or D-natural amino acid and any non-natural amino acid; see  specification as filed for detail ed description of substitutions, R-groups  and preferred embodiments
  MOD_RES (10)..(11): Any L- or D-natural amino acid and any non-natural amino acid; see  specification as filed for detail ed description of substitutions, R-groups  and preferred embodiments
  MOD_RES (13)..(13): Any L- or D-natural amino acid and any non-natural amino acid; see  specification as filed for detail ed description of substitutions, R-groups  and preferred embodiments
  MOD_RES (15)..(18): Any L- or D-natural or non-natural amino acid, and this range may     encompass 1 or 4 residues; see specification as filed for detailed  description of substitutions, R-groups and preferred emb
  c-term may be amidated
KSMXVPFSRXXFXFXXXXTVGWVQRHRKMLR

SEQ ID NO: 1017 - protein, 31 aa, Artificial Sequence
  Description of Artificial Sequence: Synthetic peptide
  MOD_RES (5)..(5): Any L- or D-natural amino acid and any non-natural amino acid; see  specification as filed for detail ed description of substitutions, R-groups  and preferred embodiments
  MOD_RES (10)..(11): Any L- or D-natural amino acid and any non-natural amino acid; see  specification as filed for detail ed description of substitutions, R-groups  and preferred embodiments
  MOD_RES (13)..(13): Any L- or D-natural amino acid and any non-natural amino acid; see  specification as filed for detail ed description of substitutions, R-groups  and preferred embodiments
  MOD_RES (15)..(18): Any L- or D-natural or non-natural amino acid, and this range may     encompass 1 or 4 residues; see specification as filed for detailed  description of substitutions, R-groups and preferred emb
  c-term may be amidated
KSMQXPFSRXXFXFXXXXTVGWVQRHRKMLR

SEQ ID NO: 1018 - protein, 31 aa, Artificial Sequence
  Description of Artificial Sequence: Synthetic peptide
  MOD_RES (6)..(6): Any L- or D-natural amino acid and any non-natural amino acid; see  specification as filed for detail ed description of substitutions, R-groups  and preferred embodiments
  MOD_RES (10)..(11): Any L- or D-natural amino acid and any non-natural amino acid; see  specification as filed for detail ed description of substitutions, R-groups  and preferred embodiments
  MOD_RES (13)..(13): Any L- or D-natural amino acid and any non-natural amino acid; see  specification as filed for detail ed description of substitutions, R-groups  and preferred embodiments
  MOD_RES (15)..(18): Any L- or D-natural or non-natural amino acid, and this range may     encompass 1 or 4 residues; see specification as filed for detailed  description of substitutions, R-groups and preferred emb
  c-term may be amidated
KSMQVXFSRXXFXFXXXXTVGWVQRHRKMLR

SEQ ID NO: 1019 - protein, 31 aa, Artificial Sequence
  Description of Artificial Sequence: Synthetic peptide
  MOD_RES (7)..(7): Any L- or D-natural amino acid and any non-natural amino acid; see  specification as filed for detail ed description of substitutions, R-groups  and preferred embodiments
  MOD_RES (10)..(11): Any L- or D-natural amino acid and any non-natural amino acid; see  specification as filed for detail ed description of substitutions, R-groups  and preferred embodiments
  MOD_RES (13)..(13): Any L- or D-natural amino acid and any non-natural amino acid; see  specification as filed for detail ed description of substitutions, R-groups  and preferred embodiments
  MOD_RES (15)..(18): Any L- or D-natural or non-natural amino acid, and this range may     encompass 1 or 4 residues; see specification as filed for detailed  description of substitutions, R-groups and preferred emb
  c-term may be amidated
KSMQVPXSRXXFXFXXXXTVGWVQRHRKMLR

SEQ ID NO: 1020 - protein, 31 aa, Artificial Sequence
  Description of Artificial Sequence: Synthetic peptide
  MOD_RES (8)..(8): Any L- or D-natural amino acid and any non-natural amino acid; see  specification as filed for detail ed description of substitutions, R-groups  and preferred embodiments
  MOD_RES (10)..(11): Any L- or D-natural amino acid and any non-natural amino acid; see  specification as filed for detail ed description of substitutions, R-groups  and preferred embodiments
  MOD_RES (13)..(13): Any L- or D-natural amino acid and any non-natural amino acid; see  specification as filed for detail ed description of substitutions, R-groups  and preferred embodiments
  MOD_RES (15)..(18): Any L- or D-natural or non-natural amino acid, and this range may     encompass 1 or 4 residues; see specification as filed for detailed  description of substitutions, R-groups and preferred emb
  c-term may be amidated
KSMQVPFXRXXFXFXXXXTVGWVQRHRKMLR

SEQ ID NO: 1021 - protein, 31 aa, Artificial Sequence
  Description of Artificial Sequence: Synthetic peptide
  MOD_RES (9)..(11): Any L- or D-natural amino acid and any non-natural amino acid; see  specification as filed for detail ed description of substitutions, R-groups  and preferred embodiments
  MOD_RES (13)..(13): Any L- or D-natural amino acid and any non-natural amino acid; see  specification as filed for detail ed description of substitutions, R-groups  and preferred embodiments
  MOD_RES (15)..(18): Any L- or D-natural or non-natural amino acid, and this range may     encompass 1 or 4 residues; see specification as filed for detailed  description of substitutions, R-groups and preferred emb
  c-term may be amidated
KSMQVPFSXXXFXFXXXXTVGWVQRHRKMLR

SEQ ID NO: 1022 - protein, 31 aa, Artificial Sequence
  Description of Artificial Sequence: Synthetic peptide
  MOD_RES (14)..(14): Any L- or D-natural amino acid and any non-natural amino acid; see  specification as filed for detail ed description of substitutions, R-groups  and preferred embodiments
  MOD_RES (15)..(18): Any L- or D-natural or non-natural amino acid, and this range may     encompass 1 or 4 residues; see specification as filed for detailed  description of substitutions, R-groups and preferred emb
  c-term may be amidated
KSMQVPFSRCCFSXXXXXTVGWVQRHRKMLR

SEQ ID NO: 1023 - protein, 31 aa, Artificial Sequence
  Description of Artificial Sequence: Synthetic peptide
  MOD_RES (10)..(11): Any L- or D-natural amino acid and any non-natural amino acid; see  specification as filed for detail ed description of substitutions, R-groups  and preferred embodiments
  MOD_RES (14)..(14): Any L- or D-natural amino acid and any non-natural amino acid; see  specification as filed for detail ed description of substitutions, R-groups  and preferred embodiments
  MOD_RES (15)..(18): Any L- or D-natural or non-natural amino acid, and this range may     encompass 1 or 4 residues; see specification as filed for detailed  description of substitutions, R-groups and preferred emb
  c-term may be amidated
KSMQVPFSRXXFSXXXXXTVGWVQRHRKMLR

SEQ ID NO: 1024 - protein, 31 aa, Artificial Sequence
  Description of Artificial Sequence: Synthetic peptide
  MOD_RES (1)..(1): Any L- or D-natural amino acid and any non-natural amino acid; see  specification as filed for detail ed description of substitutions, R-groups  and preferred embodiments
  MOD_RES (10)..(11): Any L- or D-natural amino acid and any non-natural amino acid; see  specification as filed for detail ed description of substitutions, R-groups  and preferred embodiments
  MOD_RES (14)..(14): Any L- or D-natural amino acid and any non-natural amino acid; see  specification as filed for detail ed description of substitutions, R-groups  and preferred embodiments
  MOD_RES (15)..(18): Any L- or D-natural or non-natural amino acid, and this range may     encompass 1 or 4 residues; see specification as filed for detailed  description of substitutions, R-groups and preferred emb
  c-term may be amidated
XSMQVPFSRXXFSXXXXXTVGWVQRHRKMLR

SEQ ID NO: 1025 - protein, 31 aa, Artificial Sequence
  Description of Artificial Sequence: Synthetic peptide
  MOD_RES (2)..(2): Any L- or D-natural amino acid and any non-natural amino acid; see  specification as filed for detail ed description of substitutions, R-groups  and preferred embodiments
  MOD_RES (10)..(11): Any L- or D-natural amino acid and any non-natural amino acid; see  specification as filed for detail ed description of substitutions, R-groups  and preferred embodiments
  MOD_RES (14)..(14): Any L- or D-natural amino acid and any non-natural amino acid; see  specification as filed for detail ed description of substitutions, R-groups  and preferred embodiments
  MOD_RES (15)..(18): Any L- or D-natural or non-natural amino acid, and this range may     encompass 1 or 4 residues; see specification as filed for detailed  description of substitutions, R-groups and preferred emb
  c-term may be amidated
KXMQVPFSRXXFSXXXXXTVGWVQRHRKMLR

SEQ ID NO: 1026 - protein, 31 aa, Artificial Sequence
  Description of Artificial Sequence: Synthetic peptide
  MOD_RES (3)..(3): Any L- or D-natural amino acid and any non-natural amino acid; see  specification as filed for detail ed description of substitutions, R-groups  and preferred embodiments
  MOD_RES (10)..(11): Any L- or D-natural amino acid and any non-natural amino acid; see  specification as filed for detail ed description of substitutions, R-groups  and preferred embodiments
  MOD_RES (14)..(14): Any L- or D-natural amino acid and any non-natural amino acid; see  specification as filed for detail ed description of substitutions, R-groups  and preferred embodiments
  MOD_RES (15)..(18): Any L- or D-natural or non-natural amino acid, and this range may     encompass 1 or 4 residues; see specification as filed for detailed  description of substitutions, R-groups and preferred emb
  c-term may be amidated
KSXQVPFSRXXFSXXXXXTVGWVQRHRKMLR

SEQ ID NO: 1027 - protein, 31 aa, Artificial Sequence
  Description of Artificial Sequence: Synthetic peptide
  MOD_RES (4)..(4): Any L- or D-natural amino acid and any non-natural amino acid; see  specification as filed for detail ed description of substitutions, R-groups  and preferred embodiments
  MOD_RES (10)..(11): Any L- or D-natural amino acid and any non-natural amino acid; see  specification as filed for detail ed description of substitutions, R-groups  and preferred embodiments
  MOD_RES (14)..(14): Any L- or D-natural amino acid and any non-natural amino acid; see  specification as filed for detail ed description of substitutions, R-groups  and preferred embodiments
  MOD_RES (15)..(18): Any L- or D-natural or non-natural amino acid, and this range may     encompass 1 or 4 residues; see specification as filed for detailed  description of substitutions, R-groups and preferred emb
  c-term may be amidated
KSMXVPFSRXXFSXXXXXTVGWVQRHRKMLR

SEQ ID NO: 1028 - protein, 31 aa, Artificial Sequence
  Description of Artificial Sequence: Synthetic peptide
  MOD_RES (5)..(5): Any L- or D-natural amino acid and any non-natural amino acid; see  specification as filed for detail ed description of substitutions, R-groups  and preferred embodiments
  MOD_RES (10)..(11): Any L- or D-natural amino acid and any non-natural amino acid; see  specification as filed for detail ed description of substitutions, R-groups  and preferred embodiments
  MOD_RES (14)..(14): Any L- or D-natural amino acid and any non-natural amino acid; see  specification as filed for detail ed description of substitutions, R-groups  and preferred embodiments
  MOD_RES (15)..(18): Any L- or D-natural or non-natural amino acid, and this range may     encompass 1 or 4 residues; see specification as filed for detailed  description of substitutions, R-groups and preferred emb
  c-term may be amidated
KSMQXPFSRXXFSXXXXXTVGWVQRHRKMLR

SEQ ID NO: 1029 - protein, 31 aa, Artificial Sequence
  Description of Artificial Sequence: Synthetic peptide
  MOD_RES (6)..(6): Any L- or D-natural amino acid and any non-natural amino acid; see  specification as filed for detail ed description of substitutions, R-groups  and preferred embodiments
  MOD_RES (10)..(11): Any L- or D-natural amino acid and any non-natural amino acid; see  specification as filed for detail ed description of substitutions, R-groups  and preferred embodiments
  MOD_RES (14)..(14): Any L- or D-natural amino acid and any non-natural amino acid; see  specification as filed for detail ed description of substitutions, R-groups  and preferred embodiments
  MOD_RES (15)..(18): Any L- or D-natural or non-natural amino acid, and this range may     encompass 1 or 4 residues; see specification as filed for detailed  description of substitutions, R-groups and preferred emb
  c-term may be amidated
KSMQVXFSRXXFSXXXXXTVGWVQRHRKMLR

SEQ ID NO: 1030 - protein, 31 aa, Artificial Sequence
  Description of Artificial Sequence: Synthetic peptide
  MOD_RES (7)..(7): Any L- or D-natural amino acid and any non-natural amino acid; see  specification as filed for detail ed description of substitutions, R-groups  and preferred embodiments
  MOD_RES (10)..(11): Any L- or D-natural amino acid and any non-natural amino acid; see  specification as filed for detail ed description of substitutions, R-groups  and preferred embodiments
  MOD_RES (14)..(14): Any L- or D-natural amino acid and any non-natural amino acid; see  specification as filed for detail ed description of substitutions, R-groups  and preferred embodiments
  MOD_RES (15)..(18): Any L- or D-natural or non-natural amino acid, and this range may     encompass 1 or 4 residues; see specification as filed for detailed  description of substitutions, R-groups and preferred emb
  c-term may be amidated
KSMQVPXSRXXFSXXXXXTVGWVQRHRKMLR

SEQ ID NO: 1031 - protein, 31 aa, Artificial Sequence
  Description of Artificial Sequence: Synthetic peptide
  MOD_RES (8)..(8): Any L- or D-natural amino acid and any non-natural amino acid; see  specification as filed for detail ed description of substitutions, R-groups  and preferred embodiments
  MOD_RES (10)..(11): Any L- or D-natural amino acid and any non-natural amino acid; see  specification as filed for detail ed description of substitutions, R-groups  and preferred embodiments
  MOD_RES (14)..(14): Any L- or D-natural amino acid and any non-natural amino acid; see  specification as filed for detail ed description of substitutions, R-groups  and preferred embodiments
  MOD_RES (15)..(18): Any L- or D-natural or non-natural amino acid, and this range may     encompass 1 or 4 residues; see specification as filed for detailed  description of substitutions, R-groups and preferred emb
  c-term may be amidated
KSMQVPFXRXXFSXXXXXTVGWVQRHRKMLR

SEQ ID NO: 1032 - protein, 31 aa, Artificial Sequence
  Description of Artificial Sequence: Synthetic peptide
  MOD_RES (9)..(11): Any L- or D-natural amino acid and any non-natural amino acid; see  specification as filed for detail ed description of substitutions, R-groups  and preferred embodiments
  MOD_RES (14)..(14): Any L- or D-natural amino acid and any non-natural amino acid; see  specification as filed for detail ed description of substitutions, R-groups  and preferred embodiments
  MOD_RES (15)..(18): Any L- or D-natural or non-natural amino acid, and this range may     encompass 1 or 4 residues; see specification as filed for detailed  description of substitutions, R-groups and preferred emb
  c-term may be amidated
KSMQVPFSXXXFSXXXXXTVGWVQRHRKMLR

SEQ ID NO: 1033 - protein, 34 aa, Artificial Sequence
  Description of Artificial Sequence: Synthetic peptide
  MOD_RES (18)..(21): Any L- or D-natural or non-natural amino acid, and this range may     encompass 1 or 4 residues; see specification as filed for detailed  description of substitutions, R-groups and preferred emb
  c-term may be amidated
KSMQVPFSRCCFSFAEQXXXXTVGWVQRHRKMLR

SEQ ID NO: 1034 - protein, 34 aa, Artificial Sequence
  Description of Artificial Sequence: Synthetic peptide
  MOD_RES (10)..(11): Any L- or D-natural amino acid and any non-natural amino acid; see  specification as filed for detail ed description of substitutions, R-groups  and preferred embodiments
  MOD_RES (18)..(21): Any L- or D-natural or non-natural amino acid, and this range may     encompass 1 or 4 residues; see specification as filed for detailed  description of substitutions, R-groups and preferred emb
  c-term may be amidated
KSMQVPFSRXXFSFAEQXXXXTVGWVQRHRKMLR

SEQ ID NO: 1035 - protein, 34 aa, Artificial Sequence
  Description of Artificial Sequence: Synthetic peptide
  MOD_RES (1)..(1): Any L- or D-natural amino acid and any non-natural amino acid; see  specification as filed for detail ed description of substitutions, R-groups  and preferred embodiments
  MOD_RES (10)..(11): Any L- or D-natural amino acid and any non-natural amino acid; see  specification as filed for detail ed description of substitutions, R-groups  and preferred embodiments
  MOD_RES (18)..(21): Any L- or D-natural or non-natural amino acid, and this range may     encompass 1 or 4 residues; see specification as filed for detailed  description of substitutions, R-groups and preferred emb
  c-term may be amidated
XSMQVPFSRXXFSFAEQXXXXTVGWVQRHRKMLR

SEQ ID NO: 1036 - protein, 34 aa, Artificial Sequence
  Description of Artificial Sequence: Synthetic peptide
  MOD_RES (2)..(2): Any L- or D-natural amino acid and any non-natural amino acid; see  specification as filed for detail ed description of substitutions, R-groups  and preferred embodiments
  MOD_RES (10)..(11): Any L- or D-natural amino acid and any non-natural amino acid; see  specification as filed for detail ed description of substitutions, R-groups  and preferred embodiments
  MOD_RES (18)..(21): Any L- or D-natural or non-natural amino acid, and this range may     encompass 1 or 4 residues; see specification as filed for detailed  description of substitutions, R-groups and preferred emb
  c-term may be amidated
KXMQVPFSRXXFSFAEQXXXXTVGWVQRHRKMLR

SEQ ID NO: 1037 - protein, 34 aa, Artificial Sequence
  Description of Artificial Sequence: Synthetic peptide
  MOD_RES (3)..(3): Any L- or D-natural amino acid and any non-natural amino acid; see  specification as filed for detail ed description of substitutions, R-groups  and preferred embodiments
  MOD_RES (10)..(11): Any L- or D-natural amino acid and any non-natural amino acid; see  specification as filed for detail ed description of substitutions, R-groups  and preferred embodiments
  MOD_RES (18)..(21): Any L- or D-natural or non-natural amino acid, and this range may     encompass 1 or 4 residues; see specification as filed for detailed  description of substitutions, R-groups and preferred emb
  c-term may be amidated
KSXQVPFSRXXFSFAEQXXXXTVGWVQRHRKMLR

SEQ ID NO: 1038 - protein, 34 aa, Artificial Sequence
  Description of Artificial Sequence: Synthetic peptide
  MOD_RES (4)..(4): Any L- or D-natural amino acid and any non-natural amino acid; see  specification as filed for detail ed description of substitutions, R-groups  and preferred embodiments
  MOD_RES (10)..(11): Any L- or D-natural amino acid and any non-natural amino acid; see  specification as filed for detail ed description of substitutions, R-groups  and preferred embodiments
  MOD_RES (18)..(21): Any L- or D-natural or non-natural amino acid, and this range may     encompass 1 or 4 residues; see specification as filed for detailed  description of substitutions, R-groups and preferred emb
  c-term may be amidated
KSMXVPFSRXXFSFAEQXXXXTVGWVQRHRKMLR

SEQ ID NO: 1039 - protein, 34 aa, Artificial Sequence
  Description of Artificial Sequence: Synthetic peptide
  MOD_RES (5)..(5): Any L- or D-natural amino acid and any non-natural amino acid; see  specification as filed for detail ed description of substitutions, R-groups  and preferred embodiments
  MOD_RES (10)..(11): Any L- or D-natural amino acid and any non-natural amino acid; see  specification as filed for detail ed description of substitutions, R-groups  and preferred embodiments
  MOD_RES (18)..(21): Any L- or D-natural or non-natural amino acid, and this range may     encompass 1 or 4 residues; see specification as filed for detailed  description of substitutions, R-groups and preferred emb
  c-term may be amidated
KSMQXPFSRXXFSFAEQXXXXTVGWVQRHRKMLR

SEQ ID NO: 1040 - protein, 34 aa, Artificial Sequence
  Description of Artificial Sequence: Synthetic peptide
  MOD_RES (6)..(6): Any L- or D-natural amino acid and any non-natural amino acid; see  specification as filed for detail ed description of substitutions, R-groups  and preferred embodiments
  MOD_RES (10)..(11): Any L- or D-natural amino acid and any non-natural amino acid; see  specification as filed for detail ed description of substitutions, R-groups  and preferred embodiments
  MOD_RES (18)..(21): Any L- or D-natural or non-natural amino acid, and this range may     encompass 1 or 4 residues; see specification as filed for detailed  description of substitutions, R-groups and preferred emb
  c-term may be amidated
KSMQVXFSRXXFSFAEQXXXXTVGWVQRHRKMLR

SEQ ID NO: 1041 - protein, 34 aa, Artificial Sequence
  Description of Artificial Sequence: Synthetic peptide
  MOD_RES (7)..(7): Any L- or D-natural amino acid and any non-natural amino acid; see  specification as filed for detail ed description of substitutions, R-groups  and preferred embodiments
  MOD_RES (10)..(11): Any L- or D-natural amino acid and any non-natural amino acid; see  specification as filed for detail ed description of substitutions, R-groups  and preferred embodiments
  MOD_RES (18)..(21): Any L- or D-natural or non-natural amino acid, and this range may     encompass 1 or 4 residues; see specification as filed for detailed  description of substitutions, R-groups and preferred emb
  c-term may be amidated
KSMQVPXSRXXFSFAEQXXXXTVGWVQRHRKMLR

SEQ ID NO: 1042 - protein, 34 aa, Artificial Sequence
  Description of Artificial Sequence: Synthetic peptide
  MOD_RES (8)..(8): Any L- or D-natural amino acid and any non-natural amino acid; see  specification as filed for detail ed description of substitutions, R-groups  and preferred embodiments
  MOD_RES (10)..(11): Any L- or D-natural amino acid and any non-natural amino acid; see  specification as filed for detail ed description of substitutions, R-groups  and preferred embodiments
  MOD_RES (18)..(21): Any L- or D-natural or non-natural amino acid, and this range may     encompass 1 or 4 residues; see specification as filed for detailed  description of substitutions, R-groups and preferred emb
  c-term may be amidated
KSMQVPFXRXXFSFAEQXXXXTVGWVQRHRKMLR

SEQ ID NO: 1043 - protein, 34 aa, Artificial Sequence
  Description of Artificial Sequence: Synthetic peptide
  MOD_RES (9)..(11): Any L- or D-natural amino acid and any non-natural amino acid; see  specification as filed for detail ed description of substitutions, R-groups  and preferred embodiments
  MOD_RES (18)..(21): Any L- or D-natural or non-natural amino acid, and this range may     encompass 1 or 4 residues; see specification as filed for detailed  description of substitutions, R-groups and preferred emb
  c-term may be amidated
KSMQVPFSXXXFSFAEQXXXXTVGWVQRHRKMLR

SEQ ID NO: 1044 - protein, 34 aa, Artificial Sequence
  Description of Artificial Sequence: Synthetic peptide
  MOD_RES (12)..(12): Any L- or D-natural amino acid and any non-natural amino acid; see  specification as filed for detail ed description of substitutions, R-groups  and preferred embodiments
  MOD_RES (18)..(21): Any L- or D-natural or non-natural amino acid, and this range may     encompass 1 or 4 residues; see specification as filed for detailed  description of substitutions, R-groups and preferred emb
  c-term may be amidated
KSMQVPFSRCCXSFAEQXXXXTVGWVQRHRKMLR

SEQ ID NO: 1045 - protein, 34 aa, Artificial Sequence
  Description of Artificial Sequence: Synthetic peptide
  MOD_RES (10)..(12): Any L- or D-natural amino acid and any non-natural amino acid; see  specification as filed for detail ed description of substitutions, R-groups  and preferred embodiments
  MOD_RES (18)..(21): Any L- or D-natural or non-natural amino acid, and this range may     encompass 1 or 4 residues; see specification as filed for detailed  description of substitutions, R-groups and preferred emb
  c-term may be amidated
KSMQVPFSRXXXSFAEQXXXXTVGWVQRHRKMLR

SEQ ID NO: 1046 - protein, 34 aa, Artificial Sequence
  Description of Artificial Sequence: Synthetic peptide
  MOD_RES (1)..(1): Any L- or D-natural amino acid and any non-natural amino acid; see  specification as filed for detail ed description of substitutions, R-groups  and preferred embodiments
  MOD_RES (10)..(12): Any L- or D-natural amino acid and any non-natural amino acid; see  specification as filed for detail ed description of substitutions, R-groups  and preferred embodiments
  MOD_RES (18)..(21): Any L- or D-natural or non-natural amino acid, and this range may     encompass 1 or 4 residues; see specification as filed for detailed  description of substitutions, R-groups and preferred emb
  c-term may be amidated
XSMQVPFSRXXXSFAEQXXXXTVGWVQRHRKMLR

SEQ ID NO: 1047 - protein, 34 aa, Artificial Sequence
  Description of Artificial Sequence: Synthetic peptide
  MOD_RES (2)..(2): Any L- or D-natural amino acid and any non-natural amino acid; see  specification as filed for detail ed description of substitutions, R-groups  and preferred embodiments
  MOD_RES (10)..(12): Any L- or D-natural amino acid and any non-natural amino acid; see  specification as filed for detail ed description of substitutions, R-groups  and preferred embodiments
  MOD_RES (18)..(21): Any L- or D-natural or non-natural amino acid, and this range may     encompass 1 or 4 residues; see specification as filed for detailed  description of substitutions, R-groups and preferred emb
  c-term may be amidated
KXMQVPFSRXXXSFAEQXXXXTVGWVQRHRKMLR

SEQ ID NO: 1048 - protein, 34 aa, Artificial Sequence
  Description of Artificial Sequence: Synthetic peptide
  MOD_RES (3)..(3): Any L- or D-natural amino acid and any non-natural amino acid; see  specification as filed for detail ed description of substitutions, R-groups  and preferred embodiments
  MOD_RES (10)..(12): Any L- or D-natural amino acid and any non-natural amino acid; see  specification as filed for detail ed description of substitutions, R-groups  and preferred embodiments
  MOD_RES (18)..(21): Any L- or D-natural or non-natural amino acid, and this range may     encompass 1 or 4 residues; see specification as filed for detailed  description of substitutions, R-groups and preferred emb
  c-term may be amidated
KSXQVPFSRXXXSFAEQXXXXTVGWVQRHRKMLR

SEQ ID NO: 1049 - protein, 34 aa, Artificial Sequence
  Description of Artificial Sequence: Synthetic peptide
  MOD_RES (4)..(4): Any L- or D-natural amino acid and any non-natural amino acid; see  specification as filed for detail ed description of substitutions, R-groups  and preferred embodiments
  MOD_RES (10)..(12): Any L- or D-natural amino acid and any non-natural amino acid; see  specification as filed for detail ed description of substitutions, R-groups  and preferred embodiments
  MOD_RES (18)..(21): Any L- or D-natural or non-natural amino acid, and this range may     encompass 1 or 4 residues; see specification as filed for detailed  description of substitutions, R-groups and preferred emb
  c-term may be amidated
KSMXVPFSRXXXSFAEQXXXXTVGWVQRHRKMLR

SEQ ID NO: 1050 - protein, 34 aa, Artificial Sequence
  Description of Artificial Sequence: Synthetic peptide
  MOD_RES (5)..(5): Any L- or D-natural amino acid and any non-natural amino acid; see  specification as filed for detail ed description of substitutions, R-groups  and preferred embodiments
  MOD_RES (10)..(12): Any L- or D-natural amino acid and any non-natural amino acid; see  specification as filed for detail ed description of substitutions, R-groups  and preferred embodiments
  MOD_RES (18)..(21): Any L- or D-natural or non-natural amino acid, and this range may     encompass 1 or 4 residues; see specification as filed for detailed  description of substitutions, R-groups and preferred emb
  c-term may be amidated
KSMQXPFSRXXXSFAEQXXXXTVGWVQRHRKMLR

SEQ ID NO: 1051 - protein, 34 aa, Artificial Sequence
  Description of Artificial Sequence: Synthetic peptide
  MOD_RES (6)..(6): Any L- or D-natural amino acid and any non-natural amino acid; see  specification as filed for detail ed description of substitutions, R-groups  and preferred embodiments
  MOD_RES (10)..(12): Any L- or D-natural amino acid and any non-natural amino acid; see  specification as filed for detail ed description of substitutions, R-groups  and preferred embodiments
  MOD_RES (18)..(21): Any L- or D-natural or non-natural amino acid, and this range may     encompass 1 or 4 residues; see specification as filed for detailed  description of substitutions, R-groups and preferred emb
  c-term may be amidated
KSMQVXFSRXXXSFAEQXXXXTVGWVQRHRKMLR

SEQ ID NO: 1052 - protein, 34 aa, Artificial Sequence
  Description of Artificial Sequence: Synthetic peptide
  MOD_RES (7)..(7): Any L- or D-natural amino acid and any non-natural amino acid; see  specification as filed for detail ed description of substitutions, R-groups  and preferred embodiments
  MOD_RES (10)..(12): Any L- or D-natural amino acid and any non-natural amino acid; see  specification as filed for detail ed description of substitutions, R-groups  and preferred embodiments
  MOD_RES (18)..(21): Any L- or D-natural or non-natural amino acid, and this range may     encompass 1 or 4 residues; see specification as filed for detailed  description of substitutions, R-groups and preferred emb
  c-term may be amidated
KSMQVPXSRXXXSFAEQXXXXTVGWVQRHRKMLR

SEQ ID NO: 1053 - protein, 34 aa, Artificial Sequence
  Description of Artificial Sequence: Synthetic peptide
  MOD_RES (8)..(8): Any L- or D-natural amino acid and any non-natural amino acid; see  specification as filed for detail ed description of substitutions, R-groups  and preferred embodiments
  MOD_RES (10)..(12): Any L- or D-natural amino acid and any non-natural amino acid; see  specification as filed for detail ed description of substitutions, R-groups  and preferred embodiments
  MOD_RES (18)..(21): Any L- or D-natural or non-natural amino acid, and this range may     encompass 1 or 4 residues; see specification as filed for detailed  description of substitutions, R-groups and preferred emb
  c-term may be amidated
KSMQVPFXRXXXSFAEQXXXXTVGWVQRHRKMLR

SEQ ID NO: 1054 - protein, 34 aa, Artificial Sequence
  Description of Artificial Sequence: Synthetic peptide
  MOD_RES (9)..(12): Any L- or D-natural amino acid and any non-natural amino acid; see  specification as filed for detail ed description of substitutions, R-groups  and preferred embodiments
  MOD_RES (18)..(21): Any L- or D-natural or non-natural amino acid, and this range may     encompass 1 or 4 residues; see specification as filed for detailed  description of substitutions, R-groups and preferred emb
  c-term may be amidated
KSMQVPFSXXXXSFAEQXXXXTVGWVQRHRKMLR

SEQ ID NO: 1055 - protein, 34 aa, Artificial Sequence
  Description of Artificial Sequence: Synthetic peptide
  MOD_RES (13)..(13): Any L- or D-natural amino acid and any non-natural amino acid; see  specification as filed for detail ed description of substitutions, R-groups  and preferred embodiments
  MOD_RES (18)..(21): Any L- or D-natural or non-natural amino acid, and this range may     encompass 1 or 4 residues; see specification as filed for detailed  description of substitutions, R-groups and preferred emb
  c-term may be amidated
KSMQVPFSRCCFXFAEQXXXXTVGWVQRHRKMLR

SEQ ID NO: 1056 - protein, 34 aa, Artificial Sequence
  Description of Artificial Sequence: Synthetic peptide
  MOD_RES (10)..(11): Any L- or D-natural amino acid and any non-natural amino acid; see  specification as filed for detail ed description of substitutions, R-groups  and preferred embodiments
  MOD_RES (13)..(13): Any L- or D-natural amino acid and any non-natural amino acid; see  specification as filed for detail ed description of substitutions, R-groups  and preferred embodiments
  MOD_RES (18)..(21): Any L- or D-natural or non-natural amino acid, and this range may     encompass 1 or 4 residues; see specification as filed for detailed  description of substitutions, R-groups and preferred emb
  c-term may be amidated
KSMQVPFSRXXFXFAEQXXXXTVGWVQRHRKMLR

SEQ ID NO: 1057 - protein, 34 aa, Artificial Sequence
  Description of Artificial Sequence: Synthetic peptide
  MOD_RES (1)..(1): Any L- or D-natural amino acid and any non-natural amino acid; see  specification as filed for detail ed description of substitutions, R-groups  and preferred embodiments
  MOD_RES (10)..(11): Any L- or D-natural amino acid and any non-natural amino acid; see  specification as filed for detail ed description of substitutions, R-groups  and preferred embodiments
  MOD_RES (13)..(13): Any L- or D-natural amino acid and any non-natural amino acid; see  specification as filed for detail ed description of substitutions, R-groups  and preferred embodiments
  MOD_RES (18)..(21): Any L- or D-natural or non-natural amino acid, and this range may     encompass 1 or 4 residues; see specification as filed for detailed  description of substitutions, R-groups and preferred emb
  c-term may be amidated
XSMQVPFSRXXFXFAEQXXXXTVGWVQRHRKMLR

SEQ ID NO: 1058 - protein, 34 aa, Artificial Sequence
  Description of Artificial Sequence: Synthetic peptide
  MOD_RES (2)..(2): Any L- or D-natural amino acid and any non-natural amino acid; see  specification as filed for detail ed description of substitutions, R-groups  and preferred embodiments
  MOD_RES (10)..(11): Any L- or D-natural amino acid and any non-natural amino acid; see  specification as filed for detail ed description of substitutions, R-groups  and preferred embodiments
  MOD_RES (13)..(13): Any L- or D-natural amino acid and any non-natural amino acid; see  specification as filed for detail ed description of substitutions, R-groups  and preferred embodiments
  MOD_RES (18)..(21): Any L- or D-natural or non-natural amino acid, and this range may     encompass 1 or 4 residues; see specification as filed for detailed  description of substitutions, R-groups and preferred emb
  c-term may be amidated
KXMQVPFSRXXFXFAEQXXXXTVGWVQRHRKMLR

SEQ ID NO: 1059 - protein, 34 aa, Artificial Sequence
  Description of Artificial Sequence: Synthetic peptide
  MOD_RES (3)..(3): Any L- or D-natural amino acid and any non-natural amino acid; see  specification as filed for detail ed description of substitutions, R-groups  and preferred embodiments
  MOD_RES (10)..(11): Any L- or D-natural amino acid and any non-natural amino acid; see  specification as filed for detail ed description of substitutions, R-groups  and preferred embodiments
  MOD_RES (13)..(13): Any L- or D-natural amino acid and any non-natural amino acid; see  specification as filed for detail ed description of substitutions, R-groups  and preferred embodiments
  MOD_RES (18)..(21): Any L- or D-natural or non-natural amino acid, and this range may     encompass 1 or 4 residues; see specification as filed for detailed  description of substitutions, R-groups and preferred emb
  c-term may be amidated
KSXQVPFSRXXFXFAEQXXXXTVGWVQRHRKMLR

SEQ ID NO: 1060 - protein, 34 aa, Artificial Sequence
  Description of Artificial Sequence: Synthetic peptide
  MOD_RES (4)..(4): Any L- or D-natural amino acid and any non-natural amino acid; see  specification as filed for detail ed description of substitutions, R-groups  and preferred embodiments
  MOD_RES (10)..(11): Any L- or D-natural amino acid and any non-natural amino acid; see  specification as filed for detail ed description of substitutions, R-groups  and preferred embodiments
  MOD_RES (13)..(13): Any L- or D-natural amino acid and any non-natural amino acid; see  specification as filed for detail ed description of substitutions, R-groups  and preferred embodiments
  MOD_RES (18)..(21): Any L- or D-natural or non-natural amino acid, and this range may     encompass 1 or 4 residues; see specification as filed for detailed  description of substitutions, R-groups and preferred emb
  c-term may be amidated
KSMXVPFSRXXFXFAEQXXXXTVGWVQRHRKMLR

SEQ ID NO: 1061 - protein, 34 aa, Artificial Sequence
  Description of Artificial Sequence: Synthetic peptide
  MOD_RES (5)..(5): Any L- or D-natural amino acid and any non-natural amino acid; see  specification as filed for detail ed description of substitutions, R-groups  and preferred embodiments
  MOD_RES (10)..(11): Any L- or D-natural amino acid and any non-natural amino acid; see  specification as filed for detail ed description of substitutions, R-groups  and preferred embodiments
  MOD_RES (13)..(13): Any L- or D-natural amino acid and any non-natural amino acid; see  specification as filed for detail ed description of substitutions, R-groups  and preferred embodiments
  MOD_RES (18)..(21): Any L- or D-natural or non-natural amino acid, and this range may     encompass 1 or 4 residues; see specification as filed for detailed  description of substitutions, R-groups and preferred emb
  c-term may be amidated
KSMQXPFSRXXFXFAEQXXXXTVGWVQRHRKMLR

SEQ ID NO: 1062 - protein, 34 aa, Artificial Sequence
  Description of Artificial Sequence: Synthetic peptide
  MOD_RES (6)..(6): Any L- or D-natural amino acid and any non-natural amino acid; see  specification as filed for detail ed description of substitutions, R-groups  and preferred embodiments
  MOD_RES (10)..(11): Any L- or D-natural amino acid and any non-natural amino acid; see  specification as filed for detail ed description of substitutions, R-groups  and preferred embodiments
  MOD_RES (13)..(13): Any L- or D-natural amino acid and any non-natural amino acid; see  specification as filed for detail ed description of substitutions, R-groups  and preferred embodiments
  MOD_RES (18)..(21): Any L- or D-natural or non-natural amino acid, and this range may     encompass 1 or 4 residues; see specification as filed for detailed  description of substitutions, R-groups and preferred emb
  c-term may be amidated
KSMQVXFSRXXFXFAEQXXXXTVGWVQRHRKMLR

SEQ ID NO: 1063 - protein, 34 aa, Artificial Sequence
  Description of Artificial Sequence: Synthetic peptide
  MOD_RES (7)..(7): Any L- or D-natural amino acid and any non-natural amino acid; see  specification as filed for detail ed description of substitutions, R-groups  and preferred embodiments
  MOD_RES (10)..(11): Any L- or D-natural amino acid and any non-natural amino acid; see  specification as filed for detail ed description of substitutions, R-groups  and preferred embodiments
  MOD_RES (13)..(13): Any L- or D-natural amino acid and any non-natural amino acid; see  specification as filed for detail ed description of substitutions, R-groups  and preferred embodiments
  MOD_RES (18)..(21): Any L- or D-natural or non-natural amino acid, and this range may     encompass 1 or 4 residues; see specification as filed for detailed  description of substitutions, R-groups and preferred emb
  c-term may be amidated
KSMQVPXSRXXFXFAEQXXXXTVGWVQRHRKMLR

SEQ ID NO: 1064 - protein, 34 aa, Artificial Sequence
  Description of Artificial Sequence: Synthetic peptide
  MOD_RES (8)..(8): Any L- or D-natural amino acid and any non-natural amino acid; see  specification as filed for detail ed description of substitutions, R-groups  and preferred embodiments
  MOD_RES (10)..(11): Any L- or D-natural amino acid and any non-natural amino acid; see  specification as filed for detail ed description of substitutions, R-groups  and preferred embodiments
  MOD_RES (13)..(13): Any L- or D-natural amino acid and any non-natural amino acid; see  specification as filed for detail ed description of substitutions, R-groups  and preferred embodiments
  MOD_RES (18)..(21): Any L- or D-natural or non-natural amino acid, and this range may     encompass 1 or 4 residues; see specification as filed for detailed  description of substitutions, R-groups and preferred emb
  c-term may be amidated
KSMQVPFXRXXFXFAEQXXXXTVGWVQRHRKMLR

SEQ ID NO: 1065 - protein, 34 aa, Artificial Sequence
  Description of Artificial Sequence: Synthetic peptide
  MOD_RES (9)..(11): Any L- or D-natural amino acid and any non-natural amino acid; see  specification as filed for detail ed description of substitutions, R-groups  and preferred embodiments
  MOD_RES (13)..(13): Any L- or D-natural amino acid and any non-natural amino acid; see  specification as filed for detail ed description of substitutions, R-groups  and preferred embodiments
  MOD_RES (18)..(21): Any L- or D-natural or non-natural amino acid, and this range may     encompass 1 or 4 residues; see specification as filed for detailed  description of substitutions, R-groups and preferred emb
  c-term may be amidated
KSMQVPFSXXXFXFAEQXXXXTVGWVQRHRKMLR

SEQ ID NO: 1066 - protein, 34 aa, Artificial Sequence
  Description of Artificial Sequence: Synthetic peptide
  MOD_RES (14)..(14): Any L- or D-natural amino acid and any non-natural amino acid; see  specification as filed for detail ed description of substitutions, R-groups  and preferred embodiments
  MOD_RES (18)..(21): Any L- or D-natural or non-natural amino acid, and this range may     encompass 1 or 4 residues; see specification as filed for detailed  description of substitutions, R-groups and preferred emb
  c-term may be amidated
KSMQVPFSRCCFSXAEQXXXXTVGWVQRHRKMLR

SEQ ID NO: 1067 - protein, 34 aa, Artificial Sequence
  Description of Artificial Sequence: Synthetic peptide
  MOD_RES (10)..(11): Any L- or D-natural amino acid and any non-natural amino acid; see  specification as filed for detail ed description of substitutions, R-groups  and preferred embodiments
  MOD_RES (14)..(14): Any L- or D-natural amino acid and any non-natural amino acid; see  specification as filed for detail ed description of substitutions, R-groups  and preferred embodiments
  MOD_RES (18)..(21): Any L- or D-natural or non-natural amino acid, and this range may     encompass 1 or 4 residues; see specification as filed for detailed  description of substitutions, R-groups and preferred emb
  c-term may be amidated
KSMQVPFSRXXFSXAEQXXXXTVGWVQRHRKMLR

SEQ ID NO: 1068 - protein, 34 aa, Artificial Sequence
  Description of Artificial Sequence: Synthetic peptide
  MOD_RES (1)..(1): Any L- or D-natural amino acid and any non-natural amino acid; see  specification as filed for detail ed description of substitutions, R-groups  and preferred embodiments
  MOD_RES (10)..(11): Any L- or D-natural amino acid and any non-natural amino acid; see  specification as filed for detail ed description of substitutions, R-groups  and preferred embodiments
  MOD_RES (14)..(14): Any L- or D-natural amino acid and any non-natural amino acid; see  specification as filed for detail ed description of substitutions, R-groups  and preferred embodiments
  MOD_RES (18)..(21): Any L- or D-natural or non-natural amino acid, and this range may     encompass 1 or 4 residues; see specification as filed for detailed  description of substitutions, R-groups and preferred emb
  c-term may be amidated
XSMQVPFSRXXFSXAEQXXXXTVGWVQRHRKMLR

SEQ ID NO: 1069 - protein, 34 aa, Artificial Sequence
  Description of Artificial Sequence: Synthetic peptide
  MOD_RES (2)..(2): Any L- or D-natural amino acid and any non-natural amino acid; see  specification as filed for detail ed description of substitutions, R-groups  and preferred embodiments
  MOD_RES (10)..(11): Any L- or D-natural amino acid and any non-natural amino acid; see  specification as filed for detail ed description of substitutions, R-groups  and preferred embodiments
  MOD_RES (14)..(14): Any L- or D-natural amino acid and any non-natural amino acid; see  specification as filed for detail ed description of substitutions, R-groups  and preferred embodiments
  MOD_RES (18)..(21): Any L- or D-natural or non-natural amino acid, and this range may     encompass 1 or 4 residues; see specification as filed for detailed  description of substitutions, R-groups and preferred emb
  c-term may be amidated
KXMQVPFSRXXFSXAEQXXXXTVGWVQRHRKMLR

SEQ ID NO: 1070 - protein, 34 aa, Artificial Sequence
  Description of Artificial Sequence: Synthetic peptide
  MOD_RES (3)..(3): Any L- or D-natural amino acid and any non-natural amino acid; see  specification as filed for detail ed description of substitutions, R-groups  and preferred embodiments
  MOD_RES (10)..(11): Any L- or D-natural amino acid and any non-natural amino acid; see  specification as filed for detail ed description of substitutions, R-groups  and preferred embodiments
  MOD_RES (14)..(14): Any L- or D-natural amino acid and any non-natural amino acid; see  specification as filed for detail ed description of substitutions, R-groups  and preferred embodiments
  MOD_RES (18)..(21): Any L- or D-natural or non-natural amino acid, and this range may     encompass 1 or 4 residues; see specification as filed for detailed  description of substitutions, R-groups and preferred emb
  c-term may be amidated
KSXQVPFSRXXFSXAEQXXXXTVGWVQRHRKMLR

SEQ ID NO: 1071 - protein, 34 aa, Artificial Sequence
  Description of Artificial Sequence: Synthetic peptide
  MOD_RES (4)..(4): Any L- or D-natural amino acid and any non-natural amino acid; see  specification as filed for detail ed description of substitutions, R-groups  and preferred embodiments
  MOD_RES (10)..(11): Any L- or D-natural amino acid and any non-natural amino acid; see  specification as filed for detail ed description of substitutions, R-groups  and preferred embodiments
  MOD_RES (14)..(14): Any L- or D-natural amino acid and any non-natural amino acid; see  specification as filed for detail ed description of substitutions, R-groups  and preferred embodiments
  MOD_RES (18)..(21): Any L- or D-natural or non-natural amino acid, and this range may     encompass 1 or 4 residues; see specification as filed for detailed  description of substitutions, R-groups and preferred emb
  c-term may be amidated
KSMXVPFSRXXFSXAEQXXXXTVGWVQRHRKMLR

SEQ ID NO: 1072 - protein, 34 aa, Artificial Sequence
  Description of Artificial Sequence: Synthetic peptide
  MOD_RES (5)..(5): Any L- or D-natural amino acid and any non-natural amino acid; see  specification as filed for detail ed description of substitutions, R-groups  and preferred embodiments
  MOD_RES (10)..(11): Any L- or D-natural amino acid and any non-natural amino acid; see  specification as filed for detail ed description of substitutions, R-groups  and preferred embodiments
  MOD_RES (14)..(14): Any L- or D-natural amino acid and any non-natural amino acid; see  specification as filed for detail ed description of substitutions, R-groups  and preferred embodiments
  MOD_RES (18)..(21): Any L- or D-natural or non-natural amino acid, and this range may     encompass 1 or 4 residues; see specification as filed for detailed  description of substitutions, R-groups and preferred emb
  c-term may be amidated
KSMQXPFSRXXFSXAEQXXXXTVGWVQRHRKMLR

SEQ ID NO: 1073 - protein, 34 aa, Artificial Sequence
  Description of Artificial Sequence: Synthetic peptide
  MOD_RES (6)..(6): Any L- or D-natural amino acid and any non-natural amino acid; see  specification as filed for detail ed description of substitutions, R-groups  and preferred embodiments
  MOD_RES (10)..(11): Any L- or D-natural amino acid and any non-natural amino acid; see  specification as filed for detail ed description of substitutions, R-groups  and preferred embodiments
  MOD_RES (14)..(14): Any L- or D-natural amino acid and any non-natural amino acid; see  specification as filed for detail ed description of substitutions, R-groups  and preferred embodiments
  MOD_RES (18)..(21): Any L- or D-natural or non-natural amino acid, and this range may     encompass 1 or 4 residues; see specification as filed for detailed  description of substitutions, R-groups and preferred emb
  c-term may be amidated
KSMQVXFSRXXFSXAEQXXXXTVGWVQRHRKMLR

SEQ ID NO: 1074 - protein, 34 aa, Artificial Sequence
  Description of Artificial Sequence: Synthetic peptide
  MOD_RES (7)..(7): Any L- or D-natural amino acid and any non-natural amino acid; see  specification as filed for detail ed description of substitutions, R-groups  and preferred embodiments
  MOD_RES (10)..(11): Any L- or D-natural amino acid and any non-natural amino acid; see  specification as filed for detail ed description of substitutions, R-groups  and preferred embodiments
  MOD_RES (14)..(14): Any L- or D-natural amino acid and any non-natural amino acid; see  specification as filed for detail ed description of substitutions, R-groups  and preferred embodiments
  MOD_RES (18)..(21): Any L- or D-natural or non-natural amino acid, and this range may     encompass 1 or 4 residues; see specification as filed for detailed  description of substitutions, R-groups and preferred emb
  c-term may be amidated
KSMQVPXSRXXFSXAEQXXXXTVGWVQRHRKMLR

SEQ ID NO: 1075 - protein, 34 aa, Artificial Sequence
  Description of Artificial Sequence: Synthetic peptide
  MOD_RES (8)..(8): Any L- or D-natural amino acid and any non-natural amino acid; see  specification as filed for detail ed description of substitutions, R-groups  and preferred embodiments
  MOD_RES (10)..(11): Any L- or D-natural amino acid and any non-natural amino acid; see  specification as filed for detail ed description of substitutions, R-groups  and preferred embodiments
  MOD_RES (14)..(14): Any L- or D-natural amino acid and any non-natural amino acid; see  specification as filed for detail ed description of substitutions, R-groups  and preferred embodiments
  MOD_RES (18)..(21): Any L- or D-natural or non-natural amino acid, and this range may     encompass 1 or 4 residues; see specification as filed for detailed  description of substitutions, R-groups and preferred emb
  c-term may be amidated
KSMQVPFXRXXFSXAEQXXXXTVGWVQRHRKMLR

SEQ ID NO: 1076 - protein, 34 aa, Artificial Sequence
  Description of Artificial Sequence: Synthetic peptide
  MOD_RES (9)..(11): Any L- or D-natural amino acid and any non-natural amino acid; see  specification as filed for detail ed description of substitutions, R-groups  and preferred embodiments
  MOD_RES (14)..(14): Any L- or D-natural amino acid and any non-natural amino acid; see  specification as filed for detail ed description of substitutions, R-groups  and preferred embodiments
  MOD_RES (18)..(21): Any L- or D-natural or non-natural amino acid, and this range may     encompass 1 or 4 residues; see specification as filed for detailed  description of substitutions, R-groups and preferred emb
  c-term may be amidated
KSMQVPFSXXXFSXAEQXXXXTVGWVQRHRKMLR

SEQ ID NO: 1077 - protein, 34 aa, Artificial Sequence
  Description of Artificial Sequence: Synthetic peptide
  MOD_RES (15)..(15): Any L- or D-natural amino acid and any non-natural amino acid; see  specification as filed for detail ed description of substitutions, R-groups  and preferred embodiments
  MOD_RES (18)..(21): Any L- or D-natural or non-natural amino acid, and this range may     encompass 1 or 4 residues; see specification as filed for detailed  description of substitutions, R-groups and preferred emb
  c-term may be amidated
KSMQVPFSRCCFSFXEQXXXXTVGWVQRHRKMLR

SEQ ID NO: 1078 - protein, 34 aa, Artificial Sequence
  Description of Artificial Sequence: Synthetic peptide
  MOD_RES (10)..(11): Any L- or D-natural amino acid and any non-natural amino acid; see  specification as filed for detail ed description of substitutions, R-groups  and preferred embodiments
  MOD_RES (15)..(15): Any L- or D-natural amino acid and any non-natural amino acid; see  specification as filed for detail ed description of substitutions, R-groups  and preferred embodiments
  MOD_RES (18)..(21): Any L- or D-natural or non-natural amino acid, and this range may     encompass 1 or 4 residues; see specification as filed for detailed  description of substitutions, R-groups and preferred emb
  c-term may be amidated
KSMQVPFSRXXFSFXEQXXXXTVGWVQRHRKMLR

SEQ ID NO: 1079 - protein, 34 aa, Artificial Sequence
  Description of Artificial Sequence: Synthetic peptide
  MOD_RES (1)..(1): Any L- or D-natural amino acid and any non-natural amino acid; see  specification as filed for detail ed description of substitutions, R-groups  and preferred embodiments
  MOD_RES (10)..(11): Any L- or D-natural amino acid and any non-natural amino acid; see  specification as filed for detail ed description of substitutions, R-groups  and preferred embodiments
  MOD_RES (15)..(15): Any L- or D-natural amino acid and any non-natural amino acid; see  specification as filed for detail ed description of substitutions, R-groups  and preferred embodiments
  MOD_RES (18)..(21): Any L- or D-natural or non-natural amino acid, and this range may     encompass 1 or 4 residues; see specification as filed for detailed  description of substitutions, R-groups and preferred emb
  c-term may be amidated
XSMQVPFSRXXFSFXEQXXXXTVGWVQRHRKMLR

SEQ ID NO: 1080 - protein, 34 aa, Artificial Sequence
  Description of Artificial Sequence: Synthetic peptide
  MOD_RES (2)..(2): Any L- or D-natural amino acid and any non-natural amino acid; see  specification as filed for detail ed description of substitutions, R-groups  and preferred embodiments
  MOD_RES (10)..(11): Any L- or D-natural amino acid and any non-natural amino acid; see  specification as filed for detail ed description of substitutions, R-groups  and preferred embodiments
  MOD_RES (15)..(15): Any L- or D-natural amino acid and any non-natural amino acid; see  specification as filed for detail ed description of substitutions, R-groups  and preferred embodiments
  MOD_RES (18)..(21): Any L- or D-natural or non-natural amino acid, and this range may     encompass 1 or 4 residues; see specification as filed for detailed  description of substitutions, R-groups and preferred emb
  c-term may be amidated
KXMQVPFSRXXFSFXEQXXXXTVGWVQRHRKMLR

SEQ ID NO: 1081 - protein, 34 aa, Artificial Sequence
  Description of Artificial Sequence: Synthetic peptide
  MOD_RES (3)..(3): Any L- or D-natural amino acid and any non-natural amino acid; see  specification as filed for detail ed description of substitutions, R-groups  and preferred embodiments
  MOD_RES (10)..(11): Any L- or D-natural amino acid and any non-natural amino acid; see  specification as filed for detail ed description of substitutions, R-groups  and preferred embodiments
  MOD_RES (15)..(15): Any L- or D-natural amino acid and any non-natural amino acid; see  specification as filed for detail ed description of substitutions, R-groups  and preferred embodiments
  MOD_RES (18)..(21): Any L- or D-natural or non-natural amino acid, and this range may     encompass 1 or 4 residues; see specification as filed for detailed  description of substitutions, R-groups and preferred emb
  c-term may be amidated
KSXQVPFSRXXFSFXEQXXXXTVGWVQRHRKMLR

SEQ ID NO: 1082 - protein, 34 aa, Artificial Sequence
  Description of Artificial Sequence: Synthetic peptide
  MOD_RES (4)..(4): Any L- or D-natural amino acid and any non-natural amino acid; see  specification as filed for detail ed description of substitutions, R-groups  and preferred embodiments
  MOD_RES (10)..(11): Any L- or D-natural amino acid and any non-natural amino acid; see  specification as filed for detail ed description of substitutions, R-groups  and preferred embodiments
  MOD_RES (15)..(15): Any L- or D-natural amino acid and any non-natural amino acid; see  specification as filed for detail ed description of substitutions, R-groups  and preferred embodiments
  MOD_RES (18)..(21): Any L- or D-natural or non-natural amino acid, and this range may     encompass 1 or 4 residues; see specification as filed for detailed  description of substitutions, R-groups and preferred emb
  c-term may be amidated
KSMXVPFSRXXFSFXEQXXXXTVGWVQRHRKMLR

SEQ ID NO: 1083 - protein, 34 aa, Artificial Sequence
  Description of Artificial Sequence: Synthetic peptide
  MOD_RES (5)..(5): Any L- or D-natural amino acid and any non-natural amino acid; see  specification as filed for detail ed description of substitutions, R-groups  and preferred embodiments
  MOD_RES (10)..(11): Any L- or D-natural amino acid and any non-natural amino acid; see  specification as filed for detail ed description of substitutions, R-groups  and preferred embodiments
  MOD_RES (15)..(15): Any L- or D-natural amino acid and any non-natural amino acid; see  specification as filed for detail ed description of substitutions, R-groups  and preferred embodiments
  MOD_RES (18)..(21): Any L- or D-natural or non-natural amino acid, and this range may     encompass 1 or 4 residues; see specification as filed for detailed  description of substitutions, R-groups and preferred emb
  c-term may be amidated
KSMQXPFSRXXFSFXEQXXXXTVGWVQRHRKMLR

SEQ ID NO: 1084 - protein, 34 aa, Artificial Sequence
  Description of Artificial Sequence: Synthetic peptide
  MOD_RES (6)..(6): Any L- or D-natural amino acid and any non-natural amino acid; see  specification as filed for detail ed description of substitutions, R-groups  and preferred embodiments
  MOD_RES (10)..(11): Any L- or D-natural amino acid and any non-natural amino acid; see  specification as filed for detail ed description of substitutions, R-groups  and preferred embodiments
  MOD_RES (15)..(15): Any L- or D-natural amino acid and any non-natural amino acid; see  specification as filed for detail ed description of substitutions, R-groups  and preferred embodiments
  MOD_RES (18)..(21): Any L- or D-natural or non-natural amino acid, and this range may     encompass 1 or 4 residues; see specification as filed for detailed  description of substitutions, R-groups and preferred emb
  c-term may be amidated
KSMQVXFSRXXFSFXEQXXXXTVGWVQRHRKMLR

SEQ ID NO: 1085 - protein, 34 aa, Artificial Sequence
  Description of Artificial Sequence: Synthetic peptide
  MOD_RES (7)..(7): Any L- or D-natural amino acid and any non-natural amino acid; see  specification as filed for detail ed description of substitutions, R-groups  and preferred embodiments
  MOD_RES (10)..(11): Any L- or D-natural amino acid and any non-natural amino acid; see  specification as filed for detail ed description of substitutions, R-groups  and preferred embodiments
  MOD_RES (15)..(15): Any L- or D-natural amino acid and any non-natural amino acid; see  specification as filed for detail ed description of substitutions, R-groups  and preferred embodiments
  MOD_RES (18)..(21): Any L- or D-natural or non-natural amino acid, and this range may     encompass 1 or 4 residues; see specification as filed for detailed  description of substitutions, R-groups and preferred emb
  c-term may be amidated
KSMQVPXSRXXFSFXEQXXXXTVGWVQRHRKMLR

SEQ ID NO: 1086 - protein, 34 aa, Artificial Sequence
  Description of Artificial Sequence: Synthetic peptide
  MOD_RES (8)..(8): Any L- or D-natural amino acid and any non-natural amino acid; see  specification as filed for detail ed description of substitutions, R-groups  and preferred embodiments
  MOD_RES (10)..(11): Any L- or D-natural amino acid and any non-natural amino acid; see  specification as filed for detail ed description of substitutions, R-groups  and preferred embodiments
  MOD_RES (15)..(15): Any L- or D-natural amino acid and any non-natural amino acid; see  specification as filed for detail ed description of substitutions, R-groups  and preferred embodiments
  MOD_RES (18)..(21): Any L- or D-natural or non-natural amino acid, and this range may     encompass 1 or 4 residues; see specification as filed for detailed  description of substitutions, R-groups and preferred emb
  c-term may be amidated
KSMQVPFXRXXFSFXEQXXXXTVGWVQRHRKMLR

SEQ ID NO: 1087 - protein, 34 aa, Artificial Sequence
  Description of Artificial Sequence: Synthetic peptide
  MOD_RES (9)..(11): Any L- or D-natural amino acid and any non-natural amino acid; see  specification as filed for detail ed description of substitutions, R-groups  and preferred embodiments
  MOD_RES (15)..(15): Any L- or D-natural amino acid and any non-natural amino acid; see  specification as filed for detail ed description of substitutions, R-groups  and preferred embodiments
  MOD_RES (18)..(21): Any L- or D-natural or non-natural amino acid, and this range may     encompass 1 or 4 residues; see specification as filed for detailed  description of substitutions, R-groups and preferred emb
  c-term may be amidated
KSMQVPFSXXXFSFXEQXXXXTVGWVQRHRKMLR

SEQ ID NO: 1088 - protein, 34 aa, Artificial Sequence
  Description of Artificial Sequence: Synthetic peptide
  MOD_RES (16)..(16): Any L- or D-natural amino acid and any non-natural amino acid; see  specification as filed for detail ed description of substitutions, R-groups  and preferred embodiments
  MOD_RES (18)..(21): Any L- or D-natural or non-natural amino acid, and this range may     encompass 1 or 4 residues; see specification as filed for detailed  description of substitutions, R-groups and preferred emb
  c-term may be amidated
KSMQVPFSRCCFSFAXQXXXXTVGWVQRHRKMLR

SEQ ID NO: 1089 - protein, 34 aa, Artificial Sequence
  Description of Artificial Sequence: Synthetic peptide
  MOD_RES (10)..(11): Any L- or D-natural amino acid and any non-natural amino acid; see  specification as filed for detail ed description of substitutions, R-groups  and preferred embodiments
  MOD_RES (16)..(16): Any L- or D-natural amino acid and any non-natural amino acid; see  specification as filed for detail ed description of substitutions, R-groups  and preferred embodiments
  MOD_RES (18)..(21): Any L- or D-natural or non-natural amino acid, and this range may     encompass 1 or 4 residues; see specification as filed for detailed  description of substitutions, R-groups and preferred emb
  c-term may be amidated
KSMQVPFSRXXFSFAXQXXXXTVGWVQRHRKMLR

SEQ ID NO: 1090 - protein, 34 aa, Artificial Sequence
  Description of Artificial Sequence: Synthetic peptide
  MOD_RES (1)..(1): Any L- or D-natural amino acid and any non-natural amino acid; see  specification as filed for detail ed description of substitutions, R-groups  and preferred embodiments
  MOD_RES (10)..(11): Any L- or D-natural amino acid and any non-natural amino acid; see  specification as filed for detail ed description of substitutions, R-groups  and preferred embodiments
  MOD_RES (16)..(16): Any L- or D-natural amino acid and any non-natural amino acid; see  specification as filed for detail ed description of substitutions, R-groups  and preferred embodiments
  MOD_RES (18)..(21): Any L- or D-natural or non-natural amino acid, and this range may     encompass 1 or 4 residues; see specification as filed for detailed  description of substitutions, R-groups and preferred emb
  c-term may be amidated
XSMQVPFSRXXFSFAXQXXXXTVGWVQRHRKMLR

SEQ ID NO: 1091 - protein, 34 aa, Artificial Sequence
  Description of Artificial Sequence: Synthetic peptide
  MOD_RES (2)..(2): Any L- or D-natural amino acid and any non-natural amino acid; see  specification as filed for detail ed description of substitutions, R-groups  and preferred embodiments
  MOD_RES (10)..(11): Any L- or D-natural amino acid and any non-natural amino acid; see  specification as filed for detail ed description of substitutions, R-groups  and preferred embodiments
  MOD_RES (16)..(16): Any L- or D-natural amino acid and any non-natural amino acid; see  specification as filed for detail ed description of substitutions, R-groups  and preferred embodiments
  MOD_RES (18)..(21): Any L- or D-natural or non-natural amino acid, and this range may     encompass 1 or 4 residues; see specification as filed for detailed  description of substitutions, R-groups and preferred emb
  c-term may be amidated
KXMQVPFSRXXFSFAXQXXXXTVGWVQRHRKMLR

SEQ ID NO: 1092 - protein, 34 aa, Artificial Sequence
  Description of Artificial Sequence: Synthetic peptide
  MOD_RES (3)..(3): Any L- or D-natural amino acid and any non-natural amino acid; see  specification as filed for detail ed description of substitutions, R-groups  and preferred embodiments
  MOD_RES (10)..(11): Any L- or D-natural amino acid and any non-natural amino acid; see  specification as filed for detail ed description of substitutions, R-groups  and preferred embodiments
  MOD_RES (16)..(16): Any L- or D-natural amino acid and any non-natural amino acid; see  specification as filed for detail ed description of substitutions, R-groups  and preferred embodiments
  MOD_RES (18)..(21): Any L- or D-natural or non-natural amino acid, and this range may     encompass 1 or 4 residues; see specification as filed for detailed  description of substitutions, R-groups and preferred emb
  c-term may be amidated
KSXQVPFSRXXFSFAXQXXXXTVGWVQRHRKMLR

SEQ ID NO: 1093 - protein, 34 aa, Artificial Sequence
  Description of Artificial Sequence: Synthetic peptide
  MOD_RES (4)..(4): Any L- or D-natural amino acid and any non-natural amino acid; see  specification as filed for detail ed description of substitutions, R-groups  and preferred embodiments
  MOD_RES (10)..(11): Any L- or D-natural amino acid and any non-natural amino acid; see  specification as filed for detail ed description of substitutions, R-groups  and preferred embodiments
  MOD_RES (16)..(16): Any L- or D-natural amino acid and any non-natural amino acid; see  specification as filed for detail ed description of substitutions, R-groups  and preferred embodiments
  MOD_RES (18)..(21): Any L- or D-natural or non-natural amino acid, and this range may     encompass 1 or 4 residues; see specification as filed for detailed  description of substitutions, R-groups and preferred emb
  c-term may be amidated
KSMXVPFSRXXFSFAXQXXXXTVGWVQRHRKMLR

SEQ ID NO: 1094 - protein, 34 aa, Artificial Sequence
  Description of Artificial Sequence: Synthetic peptide
  MOD_RES (17)..(17): Any L- or D-natural amino acid and any non-natural amino acid; see  specification as filed for detail ed description of substitutions, R-groups  and preferred embodiments
  MOD_RES (18)..(21): Any L- or D-natural or non-natural amino acid, and this range may     encompass 1 or 4 residues; see specification as filed for detailed  description of substitutions, R-groups and preferred emb
  c-term may be amidated
KSMQVPFSRCCFSFAEXXXXXTVGWVQRHRKMLR

SEQ ID NO: 1095 - protein, 34 aa, Artificial Sequence
  Description of Artificial Sequence: Synthetic peptide
  MOD_RES (10)..(11): Any L- or D-natural amino acid and any non-natural amino acid; see  specification as filed for detail ed description of substitutions, R-groups  and preferred embodiments
  MOD_RES (17)..(17): Any L- or D-natural amino acid and any non-natural amino acid; see  specification as filed for detail ed description of substitutions, R-groups  and preferred embodiments
  MOD_RES (18)..(21): Any L- or D-natural or non-natural amino acid, and this range may     encompass 1 or 4 residues; see specification as filed for detailed  description of substitutions, R-groups and preferred emb
  c-term may be amidated
KSMQVPFSRXXFSFAEXXXXXTVGWVQRHRKMLR

SEQ ID NO: 1096 - protein, 34 aa, Artificial Sequence
  Description of Artificial Sequence: Synthetic peptide
  MOD_RES (1)..(1): Any L- or D-natural amino acid and any non-natural amino acid; see  specification as filed for detail ed description of substitutions, R-groups  and preferred embodiments
  MOD_RES (10)..(11): Any L- or D-natural amino acid and any non-natural amino acid; see  specification as filed for detail ed description of substitutions, R-groups  and preferred embodiments
  MOD_RES (17)..(17): Any L- or D-natural amino acid and any non-natural amino acid; see  specification as filed for detail ed description of substitutions, R-groups  and preferred embodiments
  MOD_RES (18)..(21): Any L- or D-natural or non-natural amino acid, and this range may     encompass 1 or 4 residues; see specification as filed for detailed  description of substitutions, R-groups and preferred emb
  c-term may be amidated
XSMQVPFSRXXFSFAEXXXXXTVGWVQRHRKMLR

SEQ ID NO: 1097 - protein, 34 aa, Artificial Sequence
  Description of Artificial Sequence: Synthetic peptide
  MOD_RES (2)..(2): Any L- or D-natural amino acid and any non-natural amino acid; see  specification as filed for detail ed description of substitutions, R-groups  and preferred embodiments
  MOD_RES (10)..(11): Any L- or D-natural amino acid and any non-natural amino acid; see  specification as filed for detail ed description of substitutions, R-groups  and preferred embodiments
  MOD_RES (17)..(17): Any L- or D-natural amino acid and any non-natural amino acid; see  specification as filed for detail ed description of substitutions, R-groups  and preferred embodiments
  MOD_RES (18)..(21): Any L- or D-natural or non-natural amino acid, and this range may     encompass 1 or 4 residues; see specification as filed for detailed  description of substitutions, R-groups and preferred emb
  c-term may be amidated
KXMQVPFSRXXFSFAEXXXXXTVGWVQRHRKMLR

SEQ ID NO: 1098 - protein, 34 aa, Artificial Sequence
  Description of Artificial Sequence: Synthetic peptide
  MOD_RES (3)..(3): Any L- or D-natural amino acid and any non-natural amino acid; see  specification as filed for detail ed description of substitutions, R-groups  and preferred embodiments
  MOD_RES (10)..(11): Any L- or D-natural amino acid and any non-natural amino acid; see  specification as filed for detail ed description of substitutions, R-groups  and preferred embodiments
  MOD_RES (17)..(17): Any L- or D-natural amino acid and any non-natural amino acid; see  specification as filed for detail ed description of substitutions, R-groups  and preferred embodiments
  MOD_RES (18)..(21): Any L- or D-natural or non-natural amino acid, and this range may     encompass 1 or 4 residues; see specification as filed for detailed  description of substitutions, R-groups and preferred emb
  c-term may be amidated
KSXQVPFSRXXFSFAEXXXXXTVGWVQRHRKMLR

SEQ ID NO: 1099 - protein, 34 aa, Artificial Sequence
  Description of Artificial Sequence: Synthetic peptide
  MOD_RES (4)..(4): Any L- or D-natural amino acid and any non-natural amino acid; see  specification as filed for detail ed description of substitutions, R-groups  and preferred embodiments
  MOD_RES (10)..(11): Any L- or D-natural amino acid and any non-natural amino acid; see  specification as filed for detail ed description of substitutions, R-groups  and preferred embodiments
  MOD_RES (17)..(17): Any L- or D-natural amino acid and any non-natural amino acid; see  specification as filed for detail ed description of substitutions, R-groups  and preferred embodiments
  MOD_RES (18)..(21): Any L- or D-natural or non-natural amino acid, and this range may     encompass 1 or 4 residues; see specification as filed for detailed  description of substitutions, R-groups and preferred emb
  c-term may be amidated
KSMXVPFSRXXFSFAEXXXXXTVGWVQRHRKMLR

SEQ ID NO: 1100 - protein, 34 aa, Artificial Sequence
  Description of Artificial Sequence: Synthetic peptide
  MOD_RES (5)..(5): Any L- or D-natural amino acid and any non-natural amino acid; see  specification as filed for detail ed description of substitutions, R-groups  and preferred embodiments
  MOD_RES (10)..(11): Any L- or D-natural amino acid and any non-natural amino acid; see  specification as filed for detail ed description of substitutions, R-groups  and preferred embodiments
  MOD_RES (17)..(17): Any L- or D-natural amino acid and any non-natural amino acid; see  specification as filed for detail ed description of substitutions, R-groups  and preferred embodiments
  MOD_RES (18)..(21): Any L- or D-natural or non-natural amino acid, and this range may     encompass 1 or 4 residues; see specification as filed for detailed  description of substitutions, R-groups and preferred emb
  c-term may be amidated
KSMQXPFSRXXFSFAEXXXXXTVGWVQRHRKMLR

SEQ ID NO: 1101 - protein, 34 aa, Artificial Sequence
  Description of Artificial Sequence: Synthetic peptide
  MOD_RES (6)..(6): Any L- or D-natural amino acid and any non-natural amino acid; see  specification as filed for detail ed description of substitutions, R-groups  and preferred embodiments
  MOD_RES (10)..(11): Any L- or D-natural amino acid and any non-natural amino acid; see  specification as filed for detail ed description of substitutions, R-groups  and preferred embodiments
  MOD_RES (17)..(17): Any L- or D-natural amino acid and any non-natural amino acid; see  specification as filed for detail ed description of substitutions, R-groups  and preferred embodiments
  MOD_RES (18)..(21): Any L- or D-natural or non-natural amino acid, and this range may     encompass 1 or 4 residues; see specification as filed for detailed  description of substitutions, R-groups and preferred emb
  c-term may be amidated
KSMQVXFSRXXFSFAEXXXXXTVGWVQRHRKMLR

SEQ ID NO: 1102 - protein, 34 aa, Artificial Sequence
  Description of Artificial Sequence: Synthetic peptide
  MOD_RES (7)..(7): Any L- or D-natural amino acid and any non-natural amino acid; see  specification as filed for detail ed description of substitutions, R-groups  and preferred embodiments
  MOD_RES (10)..(11): Any L- or D-natural amino acid and any non-natural amino acid; see  specification as filed for detail ed description of substitutions, R-groups  and preferred embodiments
  MOD_RES (17)..(17): Any L- or D-natural amino acid and any non-natural amino acid; see  specification as filed for detail ed description of substitutions, R-groups  and preferred embodiments
  MOD_RES (18)..(21): Any L- or D-natural or non-natural amino acid, and this range may     encompass 1 or 4 residues; see specification as filed for detailed  description of substitutions, R-groups and preferred emb
  c-term may be amidated
KSMQVPXSRXXFSFAEXXXXXTVGWVQRHRKMLR

SEQ ID NO: 1103 - protein, 34 aa, Artificial Sequence
  Description of Artificial Sequence: Synthetic peptide
  MOD_RES (8)..(8): Any L- or D-natural amino acid and any non-natural amino acid; see  specification as filed for detail ed description of substitutions, R-groups  and preferred embodiments
  MOD_RES (10)..(11): Any L- or D-natural amino acid and any non-natural amino acid; see  specification as filed for detail ed description of substitutions, R-groups  and preferred embodiments
  MOD_RES (17)..(17): Any L- or D-natural amino acid and any non-natural amino acid; see  specification as filed for detail ed description of substitutions, R-groups  and preferred embodiments
  MOD_RES (18)..(21): Any L- or D-natural or non-natural amino acid, and this range may     encompass 1 or 4 residues; see specification as filed for detailed  description of substitutions, R-groups and preferred emb
  c-term may be amidated
KSMQVPFXRXXFSFAEXXXXXTVGWVQRHRKMLR

SEQ ID NO: 1104 - protein, 34 aa, Artificial Sequence
  Description of Artificial Sequence: Synthetic peptide
  MOD_RES (9)..(11): Any L- or D-natural amino acid and any non-natural amino acid; see  specification as filed for detail ed description of substitutions, R-groups  and preferred embodiments
  MOD_RES (17)..(17): Any L- or D-natural amino acid and any non-natural amino acid; see  specification as filed for detail ed description of substitutions, R-groups  and preferred embodiments
  MOD_RES (18)..(21): Any L- or D-natural or non-natural amino acid, and this range may     encompass 1 or 4 residues; see specification as filed for detailed  description of substitutions, R-groups and preferred emb
  c-term may be amidated
KSMQVPFSXXXFSFAEXXXXXTVGWVQRHRKMLR

SEQ ID NO: 1105 - protein, 31 aa, Artificial Sequence
  Description of Artificial Sequence: Synthetic peptide
  MOD_RES (15)..(18): Any L- or D-natural or non-natural amino acid, and this range may     encompass 1 or 4 residues; see specification as filed for detailed  description of substitutions, R-groups and preferred emb
  c-term may be amidated
KSMQVPFSRCCFSFXXXXTVGWVERHRKMLR

SEQ ID NO: 1106 - protein, 31 aa, Artificial Sequence
  Description of Artificial Sequence: Synthetic peptide
  MOD_RES (10)..(11): Any L- or D-natural amino acid and any non-natural amino acid; see  specification as filed for detail ed description of substitutions, R-groups  and preferred embodiments
  MOD_RES (15)..(18): Any L- or D-natural or non-natural amino acid, and this range may     encompass 1 or 4 residues; see specification as filed for detailed  description of substitutions, R-groups and preferred emb
  c-term may be amidated
KSMQVPFSRXXFSFXXXXTVGWVERHRKMLR

SEQ ID NO: 1107 - protein, 31 aa, Artificial Sequence
  Description of Artificial Sequence: Synthetic peptide
  MOD_RES (1)..(1): Any L- or D-natural amino acid and any non-natural amino acid; see  specification as filed for detail ed description of substitutions, R-groups  and preferred embodiments
  MOD_RES (10)..(11): Any L- or D-natural amino acid and any non-natural amino acid; see  specification as filed for detail ed description of substitutions, R-groups  and preferred embodiments
  MOD_RES (15)..(18): Any L- or D-natural or non-natural amino acid, and this range may     encompass 1 or 4 residues; see specification as filed for detailed  description of substitutions, R-groups and preferred emb
  c-term may be amidated
XSMQVPFSRXXFSFXXXXTVGWVERHRKMLR

SEQ ID NO: 1108 - protein, 31 aa, Artificial Sequence
  Description of Artificial Sequence: Synthetic peptide
  MOD_RES (2)..(2): Any L- or D-natural amino acid and any non-natural amino acid; see  specification as filed for detail ed description of substitutions, R-groups  and preferred embodiments
  MOD_RES (10)..(11): Any L- or D-natural amino acid and any non-natural amino acid; see  specification as filed for detail ed description of substitutions, R-groups  and preferred embodiments
  MOD_RES (15)..(18): Any L- or D-natural or non-natural amino acid, and this range may     encompass 1 or 4 residues; see specification as filed for detailed  description of substitutions, R-groups and preferred emb
  c-term may be amidated
KXMQVPFSRXXFSFXXXXTVGWVERHRKMLR

SEQ ID NO: 1109 - protein, 31 aa, Artificial Sequence
  Description of Artificial Sequence: Synthetic peptide
  MOD_RES (3)..(3): Any L- or D-natural amino acid and any non-natural amino acid; see  specification as filed for detail ed description of substitutions, R-groups  and preferred embodiments
  MOD_RES (10)..(11): Any L- or D-natural amino acid and any non-natural amino acid; see  specification as filed for detail ed description of substitutions, R-groups  and preferred embodiments
  MOD_RES (15)..(18): Any L- or D-natural or non-natural amino acid, and this range may     encompass 1 or 4 residues; see specification as filed for detailed  description of substitutions, R-groups and preferred emb
  c-term may be amidated
KSXQVPFSRXXFSFXXXXTVGWVERHRKMLR

SEQ ID NO: 1110 - protein, 31 aa, Artificial Sequence
  Description of Artificial Sequence: Synthetic peptide
  MOD_RES (4)..(4): Any L- or D-natural amino acid and any non-natural amino acid; see  specification as filed for detail ed description of substitutions, R-groups  and preferred embodiments
  MOD_RES (10)..(11): Any L- or D-natural amino acid and any non-natural amino acid; see  specification as filed for detail ed description of substitutions, R-groups  and preferred embodiments
  MOD_RES (15)..(18): Any L- or D-natural or non-natural amino acid, and this range may     encompass 1 or 4 residues; see specification as filed for detailed  description of substitutions, R-groups and preferred emb
  c-term may be amidated
KSMXVPFSRXXFSFXXXXTVGWVERHRKMLR

SEQ ID NO: 1111 - protein, 31 aa, Artificial Sequence
  Description of Artificial Sequence: Synthetic peptide
  MOD_RES (5)..(5): Any L- or D-natural amino acid and any non-natural amino acid; see  specification as filed for detail ed description of substitutions, R-groups  and preferred embodiments
  MOD_RES (10)..(11): Any L- or D-natural amino acid and any non-natural amino acid; see  specification as filed for detail ed description of substitutions, R-groups  and preferred embodiments
  MOD_RES (15)..(18): Any L- or D-natural or non-natural amino acid, and this range may     encompass 1 or 4 residues; see specification as filed for detailed  description of substitutions, R-groups and preferred emb
  c-term may be amidated
KSMQXPFSRXXFSFXXXXTVGWVERHRKMLR

SEQ ID NO: 1112 - protein, 31 aa, Artificial Sequence
  Description of Artificial Sequence: Synthetic peptide
  MOD_RES (6)..(6): Any L- or D-natural amino acid and any non-natural amino acid; see  specification as filed for detail ed description of substitutions, R-groups  and preferred embodiments
  MOD_RES (10)..(11): Any L- or D-natural amino acid and any non-natural amino acid; see  specification as filed for detail ed description of substitutions, R-groups  and preferred embodiments
  MOD_RES (15)..(18): Any L- or D-natural or non-natural amino acid, and this range may     encompass 1 or 4 residues; see specification as filed for detailed  description of substitutions, R-groups and preferred emb
  c-term may be amidated
KSMQVXFSRXXFSFXXXXTVGWVERHRKMLR

SEQ ID NO: 1113 - protein, 31 aa, Artificial Sequence
  Description of Artificial Sequence: Synthetic peptide
  MOD_RES (7)..(7): Any L- or D-natural amino acid and any non-natural amino acid; see  specification as filed for detail ed description of substitutions, R-groups  and preferred embodiments
  MOD_RES (10)..(11): Any L- or D-natural amino acid and any non-natural amino acid; see  specification as filed for detail ed description of substitutions, R-groups  and preferred embodiments
  MOD_RES (15)..(18): Any L- or D-natural or non-natural amino acid, and this range may     encompass 1 or 4 residues; see specification as filed for detailed  description of substitutions, R-groups and preferred emb
  c-term may be amidated
KSMQVPXSRXXFSFXXXXTVGWVERHRKMLR

SEQ ID NO: 1114 - protein, 31 aa, Artificial Sequence
  Description of Artificial Sequence: Synthetic peptide
  MOD_RES (8)..(8): Any L- or D-natural amino acid and any non-natural amino acid; see  specification as filed for detail ed description of substitutions, R-groups  and preferred embodiments
  MOD_RES (10)..(11): Any L- or D-natural amino acid and any non-natural amino acid; see  specification as filed for detail ed description of substitutions, R-groups  and preferred embodiments
  MOD_RES (15)..(18): Any L- or D-natural or non-natural amino acid, and this range may     encompass 1 or 4 residues; see specification as filed for detailed  description of substitutions, R-groups and preferred emb
  c-term may be amidated
KSMQVPFXRXXFSFXXXXTVGWVERHRKMLR

SEQ ID NO: 1115 - protein, 31 aa, Artificial Sequence
  Description of Artificial Sequence: Synthetic peptide
  MOD_RES (9)..(11): Any L- or D-natural amino acid and any non-natural amino acid; see  specification as filed for detail ed description of substitutions, R-groups  and preferred embodiments
  MOD_RES (15)..(18): Any L- or D-natural or non-natural amino acid, and this range may     encompass 1 or 4 residues; see specification as filed for detailed  description of substitutions, R-groups and preferred emb
  c-term may be amidated
KSMQVPFSXXXFSFXXXXTVGWVERHRKMLR

SEQ ID NO: 1116 - protein, 31 aa, Artificial Sequence
  Description of Artificial Sequence: Synthetic peptide
  MOD_RES (12)..(12): Any L- or D-natural amino acid and any non-natural amino acid; see  specification as filed for detail ed description of substitutions, R-groups  and preferred embodiments
  MOD_RES (15)..(18): Any L- or D-natural or non-natural amino acid, and this range may     encompass 1 or 4 residues; see specification as filed for detailed  description of substitutions, R-groups and preferred emb
  c-term may be amidated
KSMQVPFSRCCXSFXXXXTVGWVERHRKMLR

SEQ ID NO: 1117 - protein, 31 aa, Artificial Sequence
  Description of Artificial Sequence: Synthetic peptide
  MOD_RES (10)..(12): Any L- or D-natural amino acid and any non-natural amino acid; see  specification as filed for detail ed description of substitutions, R-groups  and preferred embodiments
  MOD_RES (15)..(18): Any L- or D-natural or non-natural amino acid, and this range may     encompass 1 or 4 residues; see specification as filed for detailed  description of substitutions, R-groups and preferred emb
  c-term may be amidated
KSMQVPFSRXXXSFXXXXTVGWVERHRKMLR

SEQ ID NO: 1118 - protein, 31 aa, Artificial Sequence
  Description of Artificial Sequence: Synthetic peptide
  MOD_RES (1)..(1): Any L- or D-natural amino acid and any non-natural amino acid; see  specification as filed for detail ed description of substitutions, R-groups  and preferred embodiments
  MOD_RES (10)..(12): Any L- or D-natural amino acid and any non-natural amino acid; see  specification as filed for detail ed description of substitutions, R-groups  and preferred embodiments
  MOD_RES (15)..(18): Any L- or D-natural or non-natural amino acid, and this range may     encompass 1 or 4 residues; see specification as filed for detailed  description of substitutions, R-groups and preferred emb
  c-term may be amidated
XSMQVPFSRXXXSFXXXXTVGWVERHRKMLR

SEQ ID NO: 1119 - protein, 31 aa, Artificial Sequence
  Description of Artificial Sequence: Synthetic peptide
  MOD_RES (2)..(2): Any L- or D-natural amino acid and any non-natural amino acid; see  specification as filed for detail ed description of substitutions, R-groups  and preferred embodiments
  MOD_RES (10)..(12): Any L- or D-natural amino acid and any non-natural amino acid; see  specification as filed for detail ed description of substitutions, R-groups  and preferred embodiments
  MOD_RES (15)..(18): Any L- or D-natural or non-natural amino acid, and this range may     encompass 1 or 4 residues; see specification as filed for detailed  description of substitutions, R-groups and preferred emb
  c-term may be amidated
KXMQVPFSRXXXSFXXXXTVGWVERHRKMLR

SEQ ID NO: 1120 - protein, 31 aa, Artificial Sequence
  Description of Artificial Sequence: Synthetic peptide
  MOD_RES (3)..(3): Any L- or D-natural amino acid and any non-natural amino acid; see  specification as filed for detail ed description of substitutions, R-groups  and preferred embodiments
  MOD_RES (10)..(12): Any L- or D-natural amino acid and any non-natural amino acid; see  specification as filed for detail ed description of substitutions, R-groups  and preferred embodiments
  MOD_RES (15)..(18): Any L- or D-natural or non-natural amino acid, and this range may     encompass 1 or 4 residues; see specification as filed for detailed  description of substitutions, R-groups and preferred emb
  c-term may be amidated
KSXQVPFSRXXXSFXXXXTVGWVERHRKMLR

SEQ ID NO: 1121 - protein, 31 aa, Artificial Sequence
  Description of Artificial Sequence: Synthetic peptide
  MOD_RES (4)..(4): Any L- or D-natural amino acid and any non-natural amino acid; see  specification as filed for detail ed description of substitutions, R-groups  and preferred embodiments
  MOD_RES (10)..(12): Any L- or D-natural amino acid and any non-natural amino acid; see  specification as filed for detail ed description of substitutions, R-groups  and preferred embodiments
  MOD_RES (15)..(18): Any L- or D-natural or non-natural amino acid, and this range may     encompass 1 or 4 residues; see specification as filed for detailed  description of substitutions, R-groups and preferred emb
  c-term may be amidated
KSMXVPFSRXXXSFXXXXTVGWVERHRKMLR

SEQ ID NO: 1122 - protein, 31 aa, Artificial Sequence
  Description of Artificial Sequence: Synthetic peptide
  MOD_RES (5)..(5): Any L- or D-natural amino acid and any non-natural amino acid; see  specification as filed for detail ed description of substitutions, R-groups  and preferred embodiments
  MOD_RES (10)..(12): Any L- or D-natural amino acid and any non-natural amino acid; see  specification as filed for detail ed description of substitutions, R-groups  and preferred embodiments
  MOD_RES (15)..(18): Any L- or D-natural or non-natural amino acid, and this range may     encompass 1 or 4 residues; see specification as filed for detailed  description of substitutions, R-groups and preferred emb
  c-term may be amidated
KSMQXPFSRXXXSFXXXXTVGWVERHRKMLR

SEQ ID NO: 1123 - protein, 31 aa, Artificial Sequence
  Description of Artificial Sequence: Synthetic peptide
  MOD_RES (6)..(6): Any L- or D-natural amino acid and any non-natural amino acid; see  specification as filed for detail ed description of substitutions, R-groups  and preferred embodiments
  MOD_RES (10)..(12): Any L- or D-natural amino acid and any non-natural amino acid; see  specification as filed for detail ed description of substitutions, R-groups  and preferred embodiments
  MOD_RES (15)..(18): Any L- or D-natural or non-natural amino acid, and this range may     encompass 1 or 4 residues; see specification as filed for detailed  description of substitutions, R-groups and preferred emb
  c-term may be amidated
KSMQVXFSRXXXSFXXXXTVGWVERHRKMLR

SEQ ID NO: 1124 - protein, 31 aa, Artificial Sequence
  Description of Artificial Sequence: Synthetic peptide
  MOD_RES (7)..(7): Any L- or D-natural amino acid and any non-natural amino acid; see  specification as filed for detail ed description of substitutions, R-groups  and preferred embodiments
  MOD_RES (10)..(12): Any L- or D-natural amino acid and any non-natural amino acid; see  specification as filed for detail ed description of substitutions, R-groups  and preferred embodiments
  MOD_RES (15)..(18): Any L- or D-natural or non-natural amino acid, and this range may     encompass 1 or 4 residues; see specification as filed for detailed  description of substitutions, R-groups and preferred emb
  c-term may be amidated
KSMQVPXSRXXXSFXXXXTVGWVERHRKMLR

SEQ ID NO: 1125 - protein, 31 aa, Artificial Sequence
  Description of Artificial Sequence: Synthetic peptide
  MOD_RES (8)..(8): Any L- or D-natural amino acid and any non-natural amino acid; see  specification as filed for detail ed description of substitutions, R-groups  and preferred embodiments
  MOD_RES (10)..(12): Any L- or D-natural amino acid and any non-natural amino acid; see  specification as filed for detail ed description of substitutions, R-groups  and preferred embodiments
  MOD_RES (15)..(18): Any L- or D-natural or non-natural amino acid, and this range may     encompass 1 or 4 residues; see specification as filed for detailed  description of substitutions, R-groups and preferred emb
  c-term may be amidated
KSMQVPFXRXXXSFXXXXTVGWVERHRKMLR

SEQ ID NO: 1126 - protein, 31 aa, Artificial Sequence
  Description of Artificial Sequence: Synthetic peptide
  MOD_RES (9)..(12): Any L- or D-natural amino acid and any non-natural amino acid; see  specification as filed for detail ed description of substitutions, R-groups  and preferred embodiments
  MOD_RES (15)..(18): Any L- or D-natural or non-natural amino acid, and this range may     encompass 1 or 4 residues; see specification as filed for detailed  description of substitutions, R-groups and preferred emb
  c-term may be amidated
KSMQVPFSXXXXSFXXXXTVGWVERHRKMLR

SEQ ID NO: 1127 - protein, 31 aa, Artificial Sequence
  Description of Artificial Sequence: Synthetic peptide
  MOD_RES (13)..(13): Any L- or D-natural amino acid and any non-natural amino acid; see  specification as filed for detail ed description of substitutions, R-groups  and preferred embodiments
  MOD_RES (15)..(18): Any L- or D-natural or non-natural amino acid, and this range may     encompass 1 or 4 residues; see specification as filed for detailed  description of substitutions, R-groups and preferred emb
  c-term may be amidated
KSMQVPFSRCCFXFXXXXTVGWVERHRKMLR

SEQ ID NO: 1128 - protein, 31 aa, Artificial Sequence
  Description of Artificial Sequence: Synthetic peptide
  MOD_RES (10)..(11): Any L- or D-natural amino acid and any non-natural amino acid; see  specification as filed for detail ed description of substitutions, R-groups  and preferred embodiments
  MOD_RES (13)..(13): Any L- or D-natural amino acid and any non-natural amino acid; see  specification as filed for detail ed description of substitutions, R-groups  and preferred embodiments
  MOD_RES (15)..(18): Any L- or D-natural or non-natural amino acid, and this range may     encompass 1 or 4 residues; see specification as filed for detailed  description of substitutions, R-groups and preferred emb
  c-term may be amidated
KSMQVPFSRXXFXFXXXXTVGWVERHRKMLR

SEQ ID NO: 1129 - protein, 31 aa, Artificial Sequence
  Description of Artificial Sequence: Synthetic peptide
  MOD_RES (1)..(1): Any L- or D-natural amino acid and any non-natural amino acid; see  specification as filed for detail ed description of substitutions, R-groups  and preferred embodiments
  MOD_RES (10)..(11): Any L- or D-natural amino acid and any non-natural amino acid; see  specification as filed for detail ed description of substitutions, R-groups  and preferred embodiments
  MOD_RES (13)..(13): Any L- or D-natural amino acid and any non-natural amino acid; see  specification as filed for detail ed description of substitutions, R-groups  and preferred embodiments
  MOD_RES (15)..(18): Any L- or D-natural or non-natural amino acid, and this range may     encompass 1 or 4 residues; see specification as filed for detailed  description of substitutions, R-groups and preferred emb
  c-term may be amidated
XSMQVPFSRXXFXFXXXXTVGWVERHRKMLR

SEQ ID NO: 1130 - protein, 31 aa, Artificial Sequence
  Description of Artificial Sequence: Synthetic peptide
  MOD_RES (2)..(2): Any L- or D-natural amino acid and any non-natural amino acid; see  specification as filed for detail ed description of substitutions, R-groups  and preferred embodiments
  MOD_RES (10)..(11): Any L- or D-natural amino acid and any non-natural amino acid; see  specification as filed for detail ed description of substitutions, R-groups  and preferred embodiments
  MOD_RES (13)..(13): Any L- or D-natural amino acid and any non-natural amino acid; see  specification as filed for detail ed description of substitutions, R-groups  and preferred embodiments
  MOD_RES (15)..(18): Any L- or D-natural or non-natural amino acid, and this range may     encompass 1 or 4 residues; see specification as filed for detailed  description of substitutions, R-groups and preferred emb
  c-term may be amidated
KXMQVPFSRXXFXFXXXXTVGWVERHRKMLR

SEQ ID NO: 1131 - protein, 31 aa, Artificial Sequence
  Description of Artificial Sequence: Synthetic peptide
  MOD_RES (3)..(3): Any L- or D-natural amino acid and any non-natural amino acid; see  specification as filed for detail ed description of substitutions, R-groups  and preferred embodiments
  MOD_RES (10)..(11): Any L- or D-natural amino acid and any non-natural amino acid; see  specification as filed for detail ed description of substitutions, R-groups  and preferred embodiments
  MOD_RES (13)..(13): Any L- or D-natural amino acid and any non-natural amino acid; see  specification as filed for detail ed description of substitutions, R-groups  and preferred embodiments
  MOD_RES (15)..(18): Any L- or D-natural or non-natural amino acid, and this range may     encompass 1 or 4 residues; see specification as filed for detailed  description of substitutions, R-groups and preferred emb
  c-term may be amidated
KSXQVPFSRXXFXFXXXXTVGWVERHRKMLR

SEQ ID NO: 1132 - protein, 31 aa, Artificial Sequence
  Description of Artificial Sequence: Synthetic peptide
  MOD_RES (4)..(4): Any L- or D-natural amino acid and any non-natural amino acid; see  specification as filed for detail ed description of substitutions, R-groups  and preferred embodiments
  MOD_RES (10)..(11): Any L- or D-natural amino acid and any non-natural amino acid; see  specification as filed for detail ed description of substitutions, R-groups  and preferred embodiments
  MOD_RES (13)..(13): Any L- or D-natural amino acid and any non-natural amino acid; see  specification as filed for detail ed description of substitutions, R-groups  and preferred embodiments
  MOD_RES (15)..(18): Any L- or D-natural or non-natural amino acid, and this range may     encompass 1 or 4 residues; see specification as filed for detailed  description of substitutions, R-groups and preferred emb
  c-term may be amidated
KSMXVPFSRXXFXFXXXXTVGWVERHRKMLR

SEQ ID NO: 1133 - protein, 31 aa, Artificial Sequence
  Description of Artificial Sequence: Synthetic peptide
  MOD_RES (5)..(5): Any L- or D-natural amino acid and any non-natural amino acid; see  specification as filed for detail ed description of substitutions, R-groups  and preferred embodiments
  MOD_RES (10)..(11): Any L- or D-natural amino acid and any non-natural amino acid; see  specification as filed for detail ed description of substitutions, R-groups  and preferred embodiments
  MOD_RES (13)..(13): Any L- or D-natural amino acid and any non-natural amino acid; see  specification as filed for detail ed description of substitutions, R-groups  and preferred embodiments
  MOD_RES (15)..(18): Any L- or D-natural or non-natural amino acid, and this range may     encompass 1 or 4 residues; see specification as filed for detailed  description of substitutions, R-groups and preferred emb
  c-term may be amidated
KSMQXPFSRXXFXFXXXXTVGWVERHRKMLR

SEQ ID NO: 1134 - protein, 31 aa, Artificial Sequence
  Description of Artificial Sequence: Synthetic peptide
  MOD_RES (6)..(6): Any L- or D-natural amino acid and any non-natural amino acid; see  specification as filed for detail ed description of substitutions, R-groups  and preferred embodiments
  MOD_RES (10)..(11): Any L- or D-natural amino acid and any non-natural amino acid; see  specification as filed for detail ed description of substitutions, R-groups  and preferred embodiments
  MOD_RES (13)..(13): Any L- or D-natural amino acid and any non-natural amino acid; see  specification as filed for detail ed description of substitutions, R-groups  and preferred embodiments
  MOD_RES (15)..(18): Any L- or D-natural or non-natural amino acid, and this range may     encompass 1 or 4 residues; see specification as filed for detailed  description of substitutions, R-groups and preferred emb
  c-term may be amidated
KSMQVXFSRXXFXFXXXXTVGWVERHRKMLR

SEQ ID NO: 1135 - protein, 31 aa, Artificial Sequence
  Description of Artificial Sequence: Synthetic peptide
  MOD_RES (7)..(7): Any L- or D-natural amino acid and any non-natural amino acid; see  specification as filed for detail ed description of substitutions, R-groups  and preferred embodiments
  MOD_RES (10)..(11): Any L- or D-natural amino acid and any non-natural amino acid; see  specification as filed for detail ed description of substitutions, R-groups  and preferred embodiments
  MOD_RES (13)..(13): Any L- or D-natural amino acid and any non-natural amino acid; see  specification as filed for detail ed description of substitutions, R-groups  and preferred embodiments
  MOD_RES (15)..(18): Any L- or D-natural or non-natural amino acid, and this range may     encompass 1 or 4 residues; see specification as filed for detailed  description of substitutions, R-groups and preferred emb
  c-term may be amidated
KSMQVPXSRXXFXFXXXXTVGWVERHRKMLR

SEQ ID NO: 1136 - protein, 31 aa, Artificial Sequence
  Description of Artificial Sequence: Synthetic peptide
  MOD_RES (8)..(8): Any L- or D-natural amino acid and any non-natural amino acid; see  specification as filed for detail ed description of substitutions, R-groups  and preferred embodiments
  MOD_RES (10)..(11): Any L- or D-natural amino acid and any non-natural amino acid; see  specification as filed for detail ed description of substitutions, R-groups  and preferred embodiments
  MOD_RES (13)..(13): Any L- or D-natural amino acid and any non-natural amino acid; see  specification as filed for detail ed description of substitutions, R-groups  and preferred embodiments
  MOD_RES (15)..(18): Any L- or D-natural or non-natural amino acid, and this range may     encompass 1 or 4 residues; see specification as filed for detailed  description of substitutions, R-groups and preferred emb
  c-term may be amidated
KSMQVPFXRXXFXFXXXXTVGWVERHRKMLR

SEQ ID NO: 1137 - protein, 31 aa, Artificial Sequence
  Description of Artificial Sequence: Synthetic peptide
  MOD_RES (9)..(11): Any L- or D-natural amino acid and any non-natural amino acid; see  specification as filed for detail ed description of substitutions, R-groups  and preferred embodiments
  MOD_RES (13)..(13): Any L- or D-natural amino acid and any non-natural amino acid; see  specification as filed for detail ed description of substitutions, R-groups  and preferred embodiments
  MOD_RES (15)..(18): Any L- or D-natural or non-natural amino acid, and this range may     encompass 1 or 4 residues; see specification as filed for detailed  description of substitutions, R-groups and preferred emb
  c-term may be amidated
KSMQVPFSXXXFXFXXXXTVGWVERHRKMLR

SEQ ID NO: 1138 - protein, 31 aa, Artificial Sequence
  Description of Artificial Sequence: Synthetic peptide
  MOD_RES (14)..(14): Any L- or D-natural amino acid and any non-natural amino acid; see  specification as filed for detail ed description of substitutions, R-groups  and preferred embodiments
  MOD_RES (15)..(18): Any L- or D-natural or non-natural amino acid, and this range may     encompass 1 or 4 residues; see specification as filed for detailed  description of substitutions, R-groups and preferred emb
  c-term may be amidated
KSMQVPFSRCCFSXXXXXTVGWVERHRKMLR

SEQ ID NO: 1139 - protein, 31 aa, Artificial Sequence
  Description of Artificial Sequence: Synthetic peptide
  MOD_RES (10)..(11): Any L- or D-natural amino acid and any non-natural amino acid; see  specification as filed for detail ed description of substitutions, R-groups  and preferred embodiments
  MOD_RES (14)..(14): Any L- or D-natural amino acid and any non-natural amino acid; see  specification as filed for detail ed description of substitutions, R-groups  and preferred embodiments
  MOD_RES (15)..(18): Any L- or D-natural or non-natural amino acid, and this range may     encompass 1 or 4 residues; see specification as filed for detailed  description of substitutions, R-groups and preferred emb
  c-term may be amidated
KSMQVPFSRXXFSXXXXXTVGWVERHRKMLR

SEQ ID NO: 1140 - protein, 31 aa, Artificial Sequence
  Description of Artificial Sequence: Synthetic peptide
  MOD_RES (1)..(1): Any L- or D-natural amino acid and any non-natural amino acid; see  specification as filed for detail ed description of substitutions, R-groups  and preferred embodiments
  MOD_RES (10)..(11): Any L- or D-natural amino acid and any non-natural amino acid; see  specification as filed for detail ed description of substitutions, R-groups  and preferred embodiments
  MOD_RES (14)..(14): Any L- or D-natural amino acid and any non-natural amino acid; see  specification as filed for detail ed description of substitutions, R-groups  and preferred embodiments
  MOD_RES (15)..(18): Any L- or D-natural or non-natural amino acid, and this range may     encompass 1 or 4 residues; see specification as filed for detailed  description of substitutions, R-groups and preferred emb
  c-term may be amidated
XSMQVPFSRXXFSXXXXXTVGWVERHRKMLR

SEQ ID NO: 1141 - protein, 31 aa, Artificial Sequence
  Description of Artificial Sequence: Synthetic peptide
  MOD_RES (2)..(2): Any L- or D-natural amino acid and any non-natural amino acid; see  specification as filed for detail ed description of substitutions, R-groups  and preferred embodiments
  MOD_RES (10)..(11): Any L- or D-natural amino acid and any non-natural amino acid; see  specification as filed for detail ed description of substitutions, R-groups  and preferred embodiments
  MOD_RES (14)..(14): Any L- or D-natural amino acid and any non-natural amino acid; see  specification as filed for detail ed description of substitutions, R-groups  and preferred embodiments
  MOD_RES (15)..(18): Any L- or D-natural or non-natural amino acid, and this range may     encompass 1 or 4 residues; see specification as filed for detailed  description of substitutions, R-groups and preferred emb
  c-term may be amidated
KXMQVPFSRXXFSXXXXXTVGWVERHRKMLR

SEQ ID NO: 1142 - protein, 31 aa, Artificial Sequence
  Description of Artificial Sequence: Synthetic peptide
  MOD_RES (3)..(3): Any L- or D-natural amino acid and any non-natural amino acid; see  specification as filed for detail ed description of substitutions, R-groups  and preferred embodiments
  MOD_RES (10)..(11): Any L- or D-natural amino acid and any non-natural amino acid; see  specification as filed for detail ed description of substitutions, R-groups  and preferred embodiments
  MOD_RES (14)..(14): Any L- or D-natural amino acid and any non-natural amino acid; see  specification as filed for detail ed description of substitutions, R-groups  and preferred embodiments
  MOD_RES (15)..(18): Any L- or D-natural or non-natural amino acid, and this range may     encompass 1 or 4 residues; see specification as filed for detailed  description of substitutions, R-groups and preferred emb
  c-term may be amidated
KSXQVPFSRXXFSXXXXXTVGWVERHRKMLR

SEQ ID NO: 1143 - protein, 31 aa, Artificial Sequence
  Description of Artificial Sequence: Synthetic peptide
  MOD_RES (4)..(4): Any L- or D-natural amino acid and any non-natural amino acid; see  specification as filed for detail ed description of substitutions, R-groups  and preferred embodiments
  MOD_RES (10)..(11): Any L- or D-natural amino acid and any non-natural amino acid; see  specification as filed for detail ed description of substitutions, R-groups  and preferred embodiments
  MOD_RES (14)..(14): Any L- or D-natural amino acid and any non-natural amino acid; see  specification as filed for detail ed description of substitutions, R-groups  and preferred embodiments
  MOD_RES (15)..(18): Any L- or D-natural or non-natural amino acid, and this range may     encompass 1 or 4 residues; see specification as filed for detailed  description of substitutions, R-groups and preferred emb
  c-term may be amidated
KSMXVPFSRXXFSXXXXXTVGWVERHRKMLR

SEQ ID NO: 1144 - protein, 31 aa, Artificial Sequence
  Description of Artificial Sequence: Synthetic peptide
  MOD_RES (5)..(5): Any L- or D-natural amino acid and any non-natural amino acid; see  specification as filed for detail ed description of substitutions, R-groups  and preferred embodiments
  MOD_RES (10)..(11): Any L- or D-natural amino acid and any non-natural amino acid; see  specification as filed for detail ed description of substitutions, R-groups  and preferred embodiments
  MOD_RES (14)..(14): Any L- or D-natural amino acid and any non-natural amino acid; see  specification as filed for detail ed description of substitutions, R-groups  and preferred embodiments
  MOD_RES (15)..(18): Any L- or D-natural or non-natural amino acid, and this range may     encompass 1 or 4 residues; see specification as filed for detailed  description of substitutions, R-groups and preferred emb
  c-term may be amidated
KSMQXPFSRXXFSXXXXXTVGWVERHRKMLR

SEQ ID NO: 1145 - protein, 31 aa, Artificial Sequence
  Description of Artificial Sequence: Synthetic peptide
  MOD_RES (6)..(6): Any L- or D-natural amino acid and any non-natural amino acid; see  specification as filed for detail ed description of substitutions, R-groups  and preferred embodiments
  MOD_RES (10)..(11): Any L- or D-natural amino acid and any non-natural amino acid; see  specification as filed for detail ed description of substitutions, R-groups  and preferred embodiments
  MOD_RES (14)..(14): Any L- or D-natural amino acid and any non-natural amino acid; see  specification as filed for detail ed description of substitutions, R-groups  and preferred embodiments
  MOD_RES (15)..(18): Any L- or D-natural or non-natural amino acid, and this range may     encompass 1 or 4 residues; see specification as filed for detailed  description of substitutions, R-groups and preferred emb
  c-term may be amidated
KSMQVXFSRXXFSXXXXXTVGWVERHRKMLR

SEQ ID NO: 1146 - protein, 31 aa, Artificial Sequence
  Description of Artificial Sequence: Synthetic peptide
  MOD_RES (7)..(7): Any L- or D-natural amino acid and any non-natural amino acid; see  specification as filed for detail ed description of substitutions, R-groups  and preferred embodiments
  MOD_RES (10)..(11): Any L- or D-natural amino acid and any non-natural amino acid; see  specification as filed for detail ed description of substitutions, R-groups  and preferred embodiments
  MOD_RES (14)..(14): Any L- or D-natural amino acid and any non-natural amino acid; see  specification as filed for detail ed description of substitutions, R-groups  and preferred embodiments
  MOD_RES (15)..(18): Any L- or D-natural or non-natural amino acid, and this range may     encompass 1 or 4 residues; see specification as filed for detailed  description of substitutions, R-groups and preferred emb
  c-term may be amidated
KSMQVPXSRXXFSXXXXXTVGWVERHRKMLR

SEQ ID NO: 1147 - protein, 31 aa, Artificial Sequence
  Description of Artificial Sequence: Synthetic peptide
  MOD_RES (8)..(8): Any L- or D-natural amino acid and any non-natural amino acid; see  specification as filed for detail ed description of substitutions, R-groups  and preferred embodiments
  MOD_RES (10)..(11): Any L- or D-natural amino acid and any non-natural amino acid; see  specification as filed for detail ed description of substitutions, R-groups  and preferred embodiments
  MOD_RES (14)..(14): Any L- or D-natural amino acid and any non-natural amino acid; see  specification as filed for detail ed description of substitutions, R-groups  and preferred embodiments
  MOD_RES (15)..(18): Any L- or D-natural or non-natural amino acid, and this range may     encompass 1 or 4 residues; see specification as filed for detailed  description of substitutions, R-groups and preferred emb
  c-term may be amidated
KSMQVPFXRXXFSXXXXXTVGWVERHRKMLR

SEQ ID NO: 1148 - protein, 31 aa, Artificial Sequence
  Description of Artificial Sequence: Synthetic peptide
  MOD_RES (9)..(11): Any L- or D-natural amino acid and any non-natural amino acid; see  specification as filed for detail ed description of substitutions, R-groups  and preferred embodiments
  MOD_RES (14)..(14): Any L- or D-natural amino acid and any non-natural amino acid; see  specification as filed for detail ed description of substitutions, R-groups  and preferred embodiments
  MOD_RES (15)..(18): Any L- or D-natural or non-natural amino acid, and this range may     encompass 1 or 4 residues; see specification as filed for detailed  description of substitutions, R-groups and preferred emb
  c-term may be amidated
KSMQVPFSXXXFSXXXXXTVGWVERHRKMLR

SEQ ID NO: 1149 - protein, 34 aa, Artificial Sequence
  Description of Artificial Sequence: Synthetic peptide
  MOD_RES (18)..(21): Any L- or D-natural or non-natural amino acid, and this range may     encompass 1 or 4 residues; see specification as filed for detailed  description of substitutions, R-groups and preferred emb
  c-term may be amidated
KSMQVPFSRCCFSFAEQXXXXTVGWVERHRKMLR

SEQ ID NO: 1150 - protein, 34 aa, Artificial Sequence
  Description of Artificial Sequence: Synthetic peptide
  MOD_RES (10)..(11): Any L- or D-natural amino acid and any non-natural amino acid; see  specification as filed for detail ed description of substitutions, R-groups  and preferred embodiments
  MOD_RES (18)..(21): Any L- or D-natural or non-natural amino acid, and this range may     encompass 1 or 4 residues; see specification as filed for detailed  description of substitutions, R-groups and preferred emb
  c-term may be amidated
KSMQVPFSRXXFSFAEQXXXXTVGWVERHRKMLR

SEQ ID NO: 1151 - protein, 34 aa, Artificial Sequence
  Description of Artificial Sequence: Synthetic peptide
  MOD_RES (1)..(1): Any L- or D-natural amino acid and any non-natural amino acid; see  specification as filed for detail ed description of substitutions, R-groups  and preferred embodiments
  MOD_RES (10)..(11): Any L- or D-natural amino acid and any non-natural amino acid; see  specification as filed for detail ed description of substitutions, R-groups  and preferred embodiments
  MOD_RES (18)..(21): Any L- or D-natural or non-natural amino acid, and this range may     encompass 1 or 4 residues; see specification as filed for detailed  description of substitutions, R-groups and preferred emb
  c-term may be amidated
XSMQVPFSRXXFSFAEQXXXXTVGWVERHRKMLR

SEQ ID NO: 1152 - protein, 34 aa, Artificial Sequence
  Description of Artificial Sequence: Synthetic peptide
  MOD_RES (2)..(2): Any L- or D-natural amino acid and any non-natural amino acid; see  specification as filed for detail ed description of substitutions, R-groups  and preferred embodiments
  MOD_RES (10)..(11): Any L- or D-natural amino acid and any non-natural amino acid; see  specification as filed for detail ed description of substitutions, R-groups  and preferred embodiments
  MOD_RES (18)..(21): Any L- or D-natural or non-natural amino acid, and this range may     encompass 1 or 4 residues; see specification as filed for detailed  description of substitutions, R-groups and preferred emb
  c-term may be amidated
KXMQVPFSRXXFSFAEQXXXXTVGWVERHRKMLR

SEQ ID NO: 1153 - protein, 34 aa, Artificial Sequence
  Description of Artificial Sequence: Synthetic peptide
  MOD_RES (3)..(3): Any L- or D-natural amino acid and any non-natural amino acid; see  specification as filed for detail ed description of substitutions, R-groups  and preferred embodiments
  MOD_RES (10)..(11): Any L- or D-natural amino acid and any non-natural amino acid; see  specification as filed for detail ed description of substitutions, R-groups  and preferred embodiments
  MOD_RES (18)..(21): Any L- or D-natural or non-natural amino acid, and this range may     encompass 1 or 4 residues; see specification as filed for detailed  description of substitutions, R-groups and preferred emb
  c-term may be amidated
KSXQVPFSRXXFSFAEQXXXXTVGWVERHRKMLR

SEQ ID NO: 1154 - protein, 34 aa, Artificial Sequence
  Description of Artificial Sequence: Synthetic peptide
  MOD_RES (4)..(4): Any L- or D-natural amino acid and any non-natural amino acid; see  specification as filed for detail ed description of substitutions, R-groups  and preferred embodiments
  MOD_RES (10)..(11): Any L- or D-natural amino acid and any non-natural amino acid; see  specification as filed for detail ed description of substitutions, R-groups  and preferred embodiments
  MOD_RES (18)..(21): Any L- or D-natural or non-natural amino acid, and this range may     encompass 1 or 4 residues; see specification as filed for detailed  description of substitutions, R-groups and preferred emb
  c-term may be amidated
KSMXVPFSRXXFSFAEQXXXXTVGWVERHRKMLR

SEQ ID NO: 1155 - protein, 34 aa, Artificial Sequence
  Description of Artificial Sequence: Synthetic peptide
  MOD_RES (5)..(5): Any L- or D-natural amino acid and any non-natural amino acid; see  specification as filed for detail ed description of substitutions, R-groups  and preferred embodiments
  MOD_RES (10)..(11): Any L- or D-natural amino acid and any non-natural amino acid; see  specification as filed for detail ed description of substitutions, R-groups  and preferred embodiments
  MOD_RES (18)..(21): Any L- or D-natural or non-natural amino acid, and this range may     encompass 1 or 4 residues; see specification as filed for detailed  description of substitutions, R-groups and preferred emb
  c-term may be amidated
KSMQXPFSRXXFSFAEQXXXXTVGWVERHRKMLR

SEQ ID NO: 1156 - protein, 34 aa, Artificial Sequence
  Description of Artificial Sequence: Synthetic peptide
  MOD_RES (6)..(6): Any L- or D-natural amino acid and any non-natural amino acid; see  specification as filed for detail ed description of substitutions, R-groups  and preferred embodiments
  MOD_RES (10)..(11): Any L- or D-natural amino acid and any non-natural amino acid; see  specification as filed for detail ed description of substitutions, R-groups  and preferred embodiments
  MOD_RES (18)..(21): Any L- or D-natural or non-natural amino acid, and this range may     encompass 1 or 4 residues; see specification as filed for detailed  description of substitutions, R-groups and preferred emb
  c-term may be amidated
KSMQVXFSRXXFSFAEQXXXXTVGWVERHRKMLR

SEQ ID NO: 1157 - protein, 34 aa, Artificial Sequence
  Description of Artificial Sequence: Synthetic peptide
  MOD_RES (7)..(7): Any L- or D-natural amino acid and any non-natural amino acid; see  specification as filed for detail ed description of substitutions, R-groups  and preferred embodiments
  MOD_RES (10)..(11): Any L- or D-natural amino acid and any non-natural amino acid; see  specification as filed for detail ed description of substitutions, R-groups  and preferred embodiments
  MOD_RES (18)..(21): Any L- or D-natural or non-natural amino acid, and this range may     encompass 1 or 4 residues; see specification as filed for detailed  description of substitutions, R-groups and preferred emb
  c-term may be amidated
KSMQVPXSRXXFSFAEQXXXXTVGWVERHRKMLR

SEQ ID NO: 1158 - protein, 34 aa, Artificial Sequence
  Description of Artificial Sequence: Synthetic peptide
  MOD_RES (8)..(8): Any L- or D-natural amino acid and any non-natural amino acid; see  specification as filed for detail ed description of substitutions, R-groups  and preferred embodiments
  MOD_RES (10)..(11): Any L- or D-natural amino acid and any non-natural amino acid; see  specification as filed for detail ed description of substitutions, R-groups  and preferred embodiments
  MOD_RES (18)..(21): Any L- or D-natural or non-natural amino acid, and this range may     encompass 1 or 4 residues; see specification as filed for detailed  description of substitutions, R-groups and preferred emb
  c-term may be amidated
KSMQVPFXRXXFSFAEQXXXXTVGWVERHRKMLR

SEQ ID NO: 1159 - protein, 34 aa, Artificial Sequence
  Description of Artificial Sequence: Synthetic peptide
  MOD_RES (9)..(11): Any L- or D-natural amino acid and any non-natural amino acid; see  specification as filed for detail ed description of substitutions, R-groups  and preferred embodiments
  MOD_RES (18)..(21): Any L- or D-natural or non-natural amino acid, and this range may     encompass 1 or 4 residues; see specification as filed for detailed  description of substitutions, R-groups and preferred emb
  c-term may be amidated
KSMQVPFSXXXFSFAEQXXXXTVGWVERHRKMLR

SEQ ID NO: 1160 - protein, 34 aa, Artificial Sequence
  Description of Artificial Sequence: Synthetic peptide
  MOD_RES (12)..(12): Any L- or D-natural amino acid and any non-natural amino acid; see  specification as filed for detail ed description of substitutions, R-groups  and preferred embodiments
  MOD_RES (18)..(21): Any L- or D-natural or non-natural amino acid, and this range may     encompass 1 or 4 residues; see specification as filed for detailed  description of substitutions, R-groups and preferred emb
  c-term may be amidated
KSMQVPFSRCCXSFAEQXXXXTVGWVERHRKMLR

SEQ ID NO: 1161 - protein, 34 aa, Artificial Sequence
  Description of Artificial Sequence: Synthetic peptide
  MOD_RES (10)..(12): Any L- or D-natural amino acid and any non-natural amino acid; see  specification as filed for detail ed description of substitutions, R-groups  and preferred embodiments
  MOD_RES (18)..(21): Any L- or D-natural or non-natural amino acid, and this range may     encompass 1 or 4 residues; see specification as filed for detailed  description of substitutions, R-groups and preferred emb
  c-term may be amidated
KSMQVPFSRXXXSFAEQXXXXTVGWVERHRKMLR

SEQ ID NO: 1162 - protein, 34 aa, Artificial Sequence
  Description of Artificial Sequence: Synthetic peptide
  MOD_RES (1)..(1): Any L- or D-natural amino acid and any non-natural amino acid; see  specification as filed for detail ed description of substitutions, R-groups  and preferred embodiments
  MOD_RES (10)..(12): Any L- or D-natural amino acid and any non-natural amino acid; see  specification as filed for detail ed description of substitutions, R-groups  and preferred embodiments
  MOD_RES (18)..(21): Any L- or D-natural or non-natural amino acid, and this range may     encompass 1 or 4 residues; see specification as filed for detailed  description of substitutions, R-groups and preferred emb
  c-term may be amidated
XSMQVPFSRXXXSFAEQXXXXTVGWVERHRKMLR

SEQ ID NO: 1163 - protein, 34 aa, Artificial Sequence
  Description of Artificial Sequence: Synthetic peptide
  MOD_RES (2)..(2): Any L- or D-natural amino acid and any non-natural amino acid; see  specification as filed for detail ed description of substitutions, R-groups  and preferred embodiments
  MOD_RES (10)..(12): Any L- or D-natural amino acid and any non-natural amino acid; see  specification as filed for detail ed description of substitutions, R-groups  and preferred embodiments
  MOD_RES (18)..(21): Any L- or D-natural or non-natural amino acid, and this range may     encompass 1 or 4 residues; see specification as filed for detailed  description of substitutions, R-groups and preferred emb
  c-term may be amidated
KXMQVPFSRXXXSFAEQXXXXTVGWVERHRKMLR

SEQ ID NO: 1164 - protein, 34 aa, Artificial Sequence
  Description of Artificial Sequence: Synthetic peptide
  MOD_RES (3)..(3): Any L- or D-natural amino acid and any non-natural amino acid; see  specification as filed for detail ed description of substitutions, R-groups  and preferred embodiments
  MOD_RES (10)..(12): Any L- or D-natural amino acid and any non-natural amino acid; see  specification as filed for detail ed description of substitutions, R-groups  and preferred embodiments
  MOD_RES (18)..(21): Any L- or D-natural or non-natural amino acid, and this range may     encompass 1 or 4 residues; see specification as filed for detailed  description of substitutions, R-groups and preferred emb
  c-term may be amidated
KSXQVPFSRXXXSFAEQXXXXTVGWVERHRKMLR

SEQ ID NO: 1165 - protein, 34 aa, Artificial Sequence
  Description of Artificial Sequence: Synthetic peptide
  MOD_RES (4)..(4): Any L- or D-natural amino acid and any non-natural amino acid; see  specification as filed for detail ed description of substitutions, R-groups  and preferred embodiments
  MOD_RES (10)..(12): Any L- or D-natural amino acid and any non-natural amino acid; see  specification as filed for detail ed description of substitutions, R-groups  and preferred embodiments
  MOD_RES (18)..(21): Any L- or D-natural or non-natural amino acid, and this range may     encompass 1 or 4 residues; see specification as filed for detailed  description of substitutions, R-groups and preferred emb
  c-term may be amidated
KSMXVPFSRXXXSFAEQXXXXTVGWVERHRKMLR

SEQ ID NO: 1166 - protein, 34 aa, Artificial Sequence
  Description of Artificial Sequence: Synthetic peptide
  MOD_RES (5)..(5): Any L- or D-natural amino acid and any non-natural amino acid; see  specification as filed for detail ed description of substitutions, R-groups  and preferred embodiments
  MOD_RES (10)..(12): Any L- or D-natural amino acid and any non-natural amino acid; see  specification as filed for detail ed description of substitutions, R-groups  and preferred embodiments
  MOD_RES (18)..(21): Any L- or D-natural or non-natural amino acid, and this range may     encompass 1 or 4 residues; see specification as filed for detailed  description of substitutions, R-groups and preferred emb
  c-term may be amidated
KSMQXPFSRXXXSFAEQXXXXTVGWVERHRKMLR

SEQ ID NO: 1167 - protein, 34 aa, Artificial Sequence
  Description of Artificial Sequence: Synthetic peptide
  MOD_RES (6)..(6): Any L- or D-natural amino acid and any non-natural amino acid; see  specification as filed for detail ed description of substitutions, R-groups  and preferred embodiments
  MOD_RES (10)..(12): Any L- or D-natural amino acid and any non-natural amino acid; see  specification as filed for detail ed description of substitutions, R-groups  and preferred embodiments
  MOD_RES (18)..(21): Any L- or D-natural or non-natural amino acid, and this range may     encompass 1 or 4 residues; see specification as filed for detailed  description of substitutions, R-groups and preferred emb
  c-term may be amidated
KSMQVXFSRXXXSFAEQXXXXTVGWVERHRKMLR

SEQ ID NO: 1168 - protein, 34 aa, Artificial Sequence
  Description of Artificial Sequence: Synthetic peptide
  MOD_RES (7)..(7): Any L- or D-natural amino acid and any non-natural amino acid; see  specification as filed for detail ed description of substitutions, R-groups  and preferred embodiments
  MOD_RES (10)..(12): Any L- or D-natural amino acid and any non-natural amino acid; see  specification as filed for detail ed description of substitutions, R-groups  and preferred embodiments
  MOD_RES (18)..(21): Any L- or D-natural or non-natural amino acid, and this range may     encompass 1 or 4 residues; see specification as filed for detailed  description of substitutions, R-groups and preferred emb
  c-term may be amidated
KSMQVPXSRXXXSFAEQXXXXTVGWVERHRKMLR

SEQ ID NO: 1169 - protein, 34 aa, Artificial Sequence
  Description of Artificial Sequence: Synthetic peptide
  MOD_RES (8)..(8): Any L- or D-natural amino acid and any non-natural amino acid; see  specification as filed for detail ed description of substitutions, R-groups  and preferred embodiments
  MOD_RES (10)..(12): Any L- or D-natural amino acid and any non-natural amino acid; see  specification as filed for detail ed description of substitutions, R-groups  and preferred embodiments
  MOD_RES (18)..(21): Any L- or D-natural or non-natural amino acid, and this range may     encompass 1 or 4 residues; see specification as filed for detailed  description of substitutions, R-groups and preferred emb
  c-term may be amidated
KSMQVPFXRXXXSFAEQXXXXTVGWVERHRKMLR

SEQ ID NO: 1170 - protein, 34 aa, Artificial Sequence
  Description of Artificial Sequence: Synthetic peptide
  MOD_RES (9)..(12): Any L- or D-natural amino acid and any non-natural amino acid; see  specification as filed for detail ed description of substitutions, R-groups  and preferred embodiments
  MOD_RES (18)..(21): Any L- or D-natural or non-natural amino acid, and this range may     encompass 1 or 4 residues; see specification as filed for detailed  description of substitutions, R-groups and preferred emb
  c-term may be amidated
KSMQVPFSXXXXSFAEQXXXXTVGWVERHRKMLR

SEQ ID NO: 1171 - protein, 34 aa, Artificial Sequence
  Description of Artificial Sequence: Synthetic peptide
  MOD_RES (13)..(13): Any L- or D-natural amino acid and any non-natural amino acid; see  specification as filed for detail ed description of substitutions, R-groups  and preferred embodiments
  MOD_RES (18)..(21): Any L- or D-natural or non-natural amino acid, and this range may     encompass 1 or 4 residues; see specification as filed for detailed  description of substitutions, R-groups and preferred emb
  c-term may be amidated
KSMQVPFSRCCFXFAEQXXXXTVGWVERHRKMLR

SEQ ID NO: 1172 - protein, 34 aa, Artificial Sequence
  Description of Artificial Sequence: Synthetic peptide
  MOD_RES (10)..(11): Any L- or D-natural amino acid and any non-natural amino acid; see  specification as filed for detail ed description of substitutions, R-groups  and preferred embodiments
  MOD_RES (13)..(13): Any L- or D-natural amino acid and any non-natural amino acid; see  specification as filed for detail ed description of substitutions, R-groups  and preferred embodiments
  MOD_RES (18)..(21): Any L- or D-natural or non-natural amino acid, and this range may     encompass 1 or 4 residues; see specification as filed for detailed  description of substitutions, R-groups and preferred emb
  c-term may be amidated
KSMQVPFSRXXFXFAEQXXXXTVGWVERHRKMLR

SEQ ID NO: 1173 - protein, 34 aa, Artificial Sequence
  Description of Artificial Sequence: Synthetic peptide
  MOD_RES (1)..(1): Any L- or D-natural amino acid and any non-natural amino acid; see  specification as filed for detail ed description of substitutions, R-groups  and preferred embodiments
  MOD_RES (10)..(11): Any L- or D-natural amino acid and any non-natural amino acid; see  specification as filed for detail ed description of substitutions, R-groups  and preferred embodiments
  MOD_RES (13)..(13): Any L- or D-natural amino acid and any non-natural amino acid; see  specification as filed for detail ed description of substitutions, R-groups  and preferred embodiments
  MOD_RES (18)..(21): Any L- or D-natural or non-natural amino acid, and this range may     encompass 1 or 4 residues; see specification as filed for detailed  description of substitutions, R-groups and preferred emb
  c-term may be amidated
XSMQVPFSRXXFXFAEQXXXXTVGWVERHRKMLR

SEQ ID NO: 1174 - protein, 34 aa, Artificial Sequence
  Description of Artificial Sequence: Synthetic peptide
  MOD_RES (2)..(2): Any L- or D-natural amino acid and any non-natural amino acid; see  specification as filed for detail ed description of substitutions, R-groups  and preferred embodiments
  MOD_RES (10)..(11): Any L- or D-natural amino acid and any non-natural amino acid; see  specification as filed for detail ed description of substitutions, R-groups  and preferred embodiments
  MOD_RES (13)..(13): Any L- or D-natural amino acid and any non-natural amino acid; see  specification as filed for detail ed description of substitutions, R-groups  and preferred embodiments
  MOD_RES (18)..(21): Any L- or D-natural or non-natural amino acid, and this range may     encompass 1 or 4 residues; see specification as filed for detailed  description of substitutions, R-groups and preferred emb
  c-term may be amidated
KXMQVPFSRXXFXFAEQXXXXTVGWVERHRKMLR

SEQ ID NO: 1175 - protein, 34 aa, Artificial Sequence
  Description of Artificial Sequence: Synthetic peptide
  MOD_RES (3)..(3): Any L- or D-natural amino acid and any non-natural amino acid; see  specification as filed for detail ed description of substitutions, R-groups  and preferred embodiments
  MOD_RES (10)..(11): Any L- or D-natural amino acid and any non-natural amino acid; see  specification as filed for detail ed description of substitutions, R-groups  and preferred embodiments
  MOD_RES (13)..(13): Any L- or D-natural amino acid and any non-natural amino acid; see  specification as filed for detail ed description of substitutions, R-groups  and preferred embodiments
  MOD_RES (18)..(21): Any L- or D-natural or non-natural amino acid, and this range may     encompass 1 or 4 residues; see specification as filed for detailed  description of substitutions, R-groups and preferred emb
  c-term may be amidated
KSXQVPFSRXXFXFAEQXXXXTVGWVERHRKMLR

SEQ ID NO: 1176 - protein, 34 aa, Artificial Sequence
  Description of Artificial Sequence: Synthetic peptide
  MOD_RES (4)..(4): Any L- or D-natural amino acid and any non-natural amino acid; see  specification as filed for detail ed description of substitutions, R-groups  and preferred embodiments
  MOD_RES (10)..(11): Any L- or D-natural amino acid and any non-natural amino acid; see  specification as filed for detail ed description of substitutions, R-groups  and preferred embodiments
  MOD_RES (13)..(13): Any L- or D-natural amino acid and any non-natural amino acid; see  specification as filed for detail ed description of substitutions, R-groups  and preferred embodiments
  MOD_RES (18)..(21): Any L- or D-natural or non-natural amino acid, and this range may     encompass 1 or 4 residues; see specification as filed for detailed  description of substitutions, R-groups and preferred emb
  c-term may be amidated
KSMXVPFSRXXFXFAEQXXXXTVGWVERHRKMLR

SEQ ID NO: 1177 - protein, 34 aa, Artificial Sequence
  Description of Artificial Sequence: Synthetic peptide
  MOD_RES (5)..(5): Any L- or D-natural amino acid and any non-natural amino acid; see  specification as filed for detail ed description of substitutions, R-groups  and preferred embodiments
  MOD_RES (10)..(11): Any L- or D-natural amino acid and any non-natural amino acid; see  specification as filed for detail ed description of substitutions, R-groups  and preferred embodiments
  MOD_RES (13)..(13): Any L- or D-natural amino acid and any non-natural amino acid; see  specification as filed for detail ed description of substitutions, R-groups  and preferred embodiments
  MOD_RES (18)..(21): Any L- or D-natural or non-natural amino acid, and this range may     encompass 1 or 4 residues; see specification as filed for detailed  description of substitutions, R-groups and preferred emb
  c-term may be amidated
KSMQXPFSRXXFXFAEQXXXXTVGWVERHRKMLR

SEQ ID NO: 1178 - protein, 34 aa, Artificial Sequence
  Description of Artificial Sequence: Synthetic peptide
  MOD_RES (6)..(6): Any L- or D-natural amino acid and any non-natural amino acid; see  specification as filed for detail ed description of substitutions, R-groups  and preferred embodiments
  MOD_RES (10)..(11): Any L- or D-natural amino acid and any non-natural amino acid; see  specification as filed for detail ed description of substitutions, R-groups  and preferred embodiments
  MOD_RES (13)..(13): Any L- or D-natural amino acid and any non-natural amino acid; see  specification as filed for detail ed description of substitutions, R-groups  and preferred embodiments
  MOD_RES (18)..(21): Any L- or D-natural or non-natural amino acid, and this range may     encompass 1 or 4 residues; see specification as filed for detailed  description of substitutions, R-groups and preferred emb
  c-term may be amidated
KSMQVXFSRXXFXFAEQXXXXTVGWVERHRKMLR

SEQ ID NO: 1179 - protein, 34 aa, Artificial Sequence
  Description of Artificial Sequence: Synthetic peptide
  MOD_RES (7)..(7): Any L- or D-natural amino acid and any non-natural amino acid; see  specification as filed for detail ed description of substitutions, R-groups  and preferred embodiments
  MOD_RES (10)..(11): Any L- or D-natural amino acid and any non-natural amino acid; see  specification as filed for detail ed description of substitutions, R-groups  and preferred embodiments
  MOD_RES (13)..(13): Any L- or D-natural amino acid and any non-natural amino acid; see  specification as filed for detail ed description of substitutions, R-groups  and preferred embodiments
  MOD_RES (18)..(21): Any L- or D-natural or non-natural amino acid, and this range may     encompass 1 or 4 residues; see specification as filed for detailed  description of substitutions, R-groups and preferred emb
  c-term may be amidated
KSMQVPXSRXXFXFAEQXXXXTVGWVERHRKMLR

SEQ ID NO: 1180 - protein, 34 aa, Artificial Sequence
  Description of Artificial Sequence: Synthetic peptide
  MOD_RES (8)..(8): Any L- or D-natural amino acid and any non-natural amino acid; see  specification as filed for detail ed description of substitutions, R-groups  and preferred embodiments
  MOD_RES (10)..(11): Any L- or D-natural amino acid and any non-natural amino acid; see  specification as filed for detail ed description of substitutions, R-groups  and preferred embodiments
  MOD_RES (13)..(13): Any L- or D-natural amino acid and any non-natural amino acid; see  specification as filed for detail ed description of substitutions, R-groups  and preferred embodiments
  MOD_RES (18)..(21): Any L- or D-natural or non-natural amino acid, and this range may     encompass 1 or 4 residues; see specification as filed for detailed  description of substitutions, R-groups and preferred emb
  c-term may be amidated
KSMQVPFXRXXFXFAEQXXXXTVGWVERHRKMLR

SEQ ID NO: 1181 - protein, 34 aa, Artificial Sequence
  Description of Artificial Sequence: Synthetic peptide
  MOD_RES (9)..(11): Any L- or D-natural amino acid and any non-natural amino acid; see  specification as filed for detail ed description of substitutions, R-groups  and preferred embodiments
  MOD_RES (13)..(13): Any L- or D-natural amino acid and any non-natural amino acid; see  specification as filed for detail ed description of substitutions, R-groups  and preferred embodiments
  MOD_RES (18)..(21): Any L- or D-natural or non-natural amino acid, and this range may     encompass 1 or 4 residues; see specification as filed for detailed  description of substitutions, R-groups and preferred emb
  c-term may be amidated
KSMQVPFSXXXFXFAEQXXXXTVGWVERHRKMLR

SEQ ID NO: 1182 - protein, 34 aa, Artificial Sequence
  Description of Artificial Sequence: Synthetic peptide
  MOD_RES (14)..(14): Any L- or D-natural amino acid and any non-natural amino acid; see  specification as filed for detail ed description of substitutions, R-groups  and preferred embodiments
  MOD_RES (18)..(21): Any L- or D-natural or non-natural amino acid, and this range may     encompass 1 or 4 residues; see specification as filed for detailed  description of substitutions, R-groups and preferred emb
  c-term may be amidated
KSMQVPFSRCCFSXAEQXXXXTVGWVERHRKMLR

SEQ ID NO: 1183 - protein, 34 aa, Artificial Sequence
  Description of Artificial Sequence: Synthetic peptide
  MOD_RES (10)..(11): Any L- or D-natural amino acid and any non-natural amino acid; see  specification as filed for detail ed description of substitutions, R-groups  and preferred embodiments
  MOD_RES (14)..(14): Any L- or D-natural amino acid and any non-natural amino acid; see  specification as filed for detail ed description of substitutions, R-groups  and preferred embodiments
  MOD_RES (18)..(21): Any L- or D-natural or non-natural amino acid, and this range may     encompass 1 or 4 residues; see specification as filed for detailed  description of substitutions, R-groups and preferred emb
  c-term may be amidated
KSMQVPFSRXXFSXAEQXXXXTVGWVERHRKMLR

SEQ ID NO: 1184 - protein, 34 aa, Artificial Sequence
  Description of Artificial Sequence: Synthetic peptide
  MOD_RES (1)..(1): Any L- or D-natural amino acid and any non-natural amino acid; see  specification as filed for detail ed description of substitutions, R-groups  and preferred embodiments
  MOD_RES (10)..(11): Any L- or D-natural amino acid and any non-natural amino acid; see  specification as filed for detail ed description of substitutions, R-groups  and preferred embodiments
  MOD_RES (14)..(14): Any L- or D-natural amino acid and any non-natural amino acid; see  specification as filed for detail ed description of substitutions, R-groups  and preferred embodiments
  MOD_RES (18)..(21): Any L- or D-natural or non-natural amino acid, and this range may     encompass 1 or 4 residues; see specification as filed for detailed  description of substitutions, R-groups and preferred emb
  c-term may be amidated
XSMQVPFSRXXFSXAEQXXXXTVGWVERHRKMLR

SEQ ID NO: 1185 - protein, 34 aa, Artificial Sequence
  Description of Artificial Sequence: Synthetic peptide
  MOD_RES (2)..(2): Any L- or D-natural amino acid and any non-natural amino acid; see  specification as filed for detail ed description of substitutions, R-groups  and preferred embodiments
  MOD_RES (10)..(11): Any L- or D-natural amino acid and any non-natural amino acid; see  specification as filed for detail ed description of substitutions, R-groups  and preferred embodiments
  MOD_RES (14)..(14): Any L- or D-natural amino acid and any non-natural amino acid; see  specification as filed for detail ed description of substitutions, R-groups  and preferred embodiments
  MOD_RES (18)..(21): Any L- or D-natural or non-natural amino acid, and this range may     encompass 1 or 4 residues; see specification as filed for detailed  description of substitutions, R-groups and preferred emb
  c-term may be amidated
KXMQVPFSRXXFSXAEQXXXXTVGWVERHRKMLR

SEQ ID NO: 1186 - protein, 34 aa, Artificial Sequence
  Description of Artificial Sequence: Synthetic peptide
  MOD_RES (3)..(3): Any L- or D-natural amino acid and any non-natural amino acid; see  specification as filed for detail ed description of substitutions, R-groups  and preferred embodiments
  MOD_RES (10)..(11): Any L- or D-natural amino acid and any non-natural amino acid; see  specification as filed for detail ed description of substitutions, R-groups  and preferred embodiments
  MOD_RES (14)..(14): Any L- or D-natural amino acid and any non-natural amino acid; see  specification as filed for detail ed description of substitutions, R-groups  and preferred embodiments
  MOD_RES (18)..(21): Any L- or D-natural or non-natural amino acid, and this range may     encompass 1 or 4 residues; see specification as filed for detailed  description of substitutions, R-groups and preferred emb
  c-term may be amidated
KSXQVPFSRXXFSXAEQXXXXTVGWVERHRKMLR

SEQ ID NO: 1187 - protein, 34 aa, Artificial Sequence
  Description of Artificial Sequence: Synthetic peptide
  MOD_RES (4)..(4): Any L- or D-natural amino acid and any non-natural amino acid; see  specification as filed for detail ed description of substitutions, R-groups  and preferred embodiments
  MOD_RES (10)..(11): Any L- or D-natural amino acid and any non-natural amino acid; see  specification as filed for detail ed description of substitutions, R-groups  and preferred embodiments
  MOD_RES (14)..(14): Any L- or D-natural amino acid and any non-natural amino acid; see  specification as filed for detail ed description of substitutions, R-groups  and preferred embodiments
  MOD_RES (18)..(21): Any L- or D-natural or non-natural amino acid, and this range may     encompass 1 or 4 residues; see specification as filed for detailed  description of substitutions, R-groups and preferred emb
  c-term may be amidated
KSMXVPFSRXXFSXAEQXXXXTVGWVERHRKMLR

SEQ ID NO: 1188 - protein, 34 aa, Artificial Sequence
  Description of Artificial Sequence: Synthetic peptide
  MOD_RES (5)..(5): Any L- or D-natural amino acid and any non-natural amino acid; see  specification as filed for detail ed description of substitutions, R-groups  and preferred embodiments
  MOD_RES (10)..(11): Any L- or D-natural amino acid and any non-natural amino acid; see  specification as filed for detail ed description of substitutions, R-groups  and preferred embodiments
  MOD_RES (14)..(14): Any L- or D-natural amino acid and any non-natural amino acid; see  specification as filed for detail ed description of substitutions, R-groups  and preferred embodiments
  MOD_RES (18)..(21): Any L- or D-natural or non-natural amino acid, and this range may     encompass 1 or 4 residues; see specification as filed for detailed  description of substitutions, R-groups and preferred emb
  c-term may be amidated
KSMQXPFSRXXFSXAEQXXXXTVGWVERHRKMLR

SEQ ID NO: 1189 - protein, 34 aa, Artificial Sequence
  Description of Artificial Sequence: Synthetic peptide
  MOD_RES (6)..(6): Any L- or D-natural amino acid and any non-natural amino acid; see  specification as filed for detail ed description of substitutions, R-groups  and preferred embodiments
  MOD_RES (10)..(11): Any L- or D-natural amino acid and any non-natural amino acid; see  specification as filed for detail ed description of substitutions, R-groups  and preferred embodiments
  MOD_RES (14)..(14): Any L- or D-natural amino acid and any non-natural amino acid; see  specification as filed for detail ed description of substitutions, R-groups  and preferred embodiments
  MOD_RES (18)..(21): Any L- or D-natural or non-natural amino acid, and this range may     encompass 1 or 4 residues; see specification as filed for detailed  description of substitutions, R-groups and preferred emb
  c-term may be amidated
KSMQVXFSRXXFSXAEQXXXXTVGWVERHRKMLR

SEQ ID NO: 1190 - protein, 34 aa, Artificial Sequence
  Description of Artificial Sequence: Synthetic peptide
  MOD_RES (7)..(7): Any L- or D-natural amino acid and any non-natural amino acid; see  specification as filed for detail ed description of substitutions, R-groups  and preferred embodiments
  MOD_RES (10)..(11): Any L- or D-natural amino acid and any non-natural amino acid; see  specification as filed for detail ed description of substitutions, R-groups  and preferred embodiments
  MOD_RES (14)..(14): Any L- or D-natural amino acid and any non-natural amino acid; see  specification as filed for detail ed description of substitutions, R-groups  and preferred embodiments
  MOD_RES (18)..(21): Any L- or D-natural or non-natural amino acid, and this range may     encompass 1 or 4 residues; see specification as filed for detailed  description of substitutions, R-groups and preferred emb
  c-term may be amidated
KSMQVPXSRXXFSXAEQXXXXTVGWVERHRKMLR

SEQ ID NO: 1191 - protein, 34 aa, Artificial Sequence
  Description of Artificial Sequence: Synthetic peptide
  MOD_RES (8)..(8): Any L- or D-natural amino acid and any non-natural amino acid; see  specification as filed for detail ed description of substitutions, R-groups  and preferred embodiments
  MOD_RES (10)..(11): Any L- or D-natural amino acid and any non-natural amino acid; see  specification as filed for detail ed description of substitutions, R-groups  and preferred embodiments
  MOD_RES (14)..(14): Any L- or D-natural amino acid and any non-natural amino acid; see  specification as filed for detail ed description of substitutions, R-groups  and preferred embodiments
  MOD_RES (18)..(21): Any L- or D-natural or non-natural amino acid, and this range may     encompass 1 or 4 residues; see specification as filed for detailed  description of substitutions, R-groups and preferred emb
  c-term may be amidated
KSMQVPFXRXXFSXAEQXXXXTVGWVERHRKMLR

SEQ ID NO: 1192 - protein, 34 aa, Artificial Sequence
  Description of Artificial Sequence: Synthetic peptide
  MOD_RES (9)..(11): Any L- or D-natural amino acid and any non-natural amino acid; see  specification as filed for detail ed description of substitutions, R-groups  and preferred embodiments
  MOD_RES (14)..(14): Any L- or D-natural amino acid and any non-natural amino acid; see  specification as filed for detail ed description of substitutions, R-groups  and preferred embodiments
  MOD_RES (18)..(21): Any L- or D-natural or non-natural amino acid, and this range may     encompass 1 or 4 residues; see specification as filed for detailed  description of substitutions, R-groups and preferred emb
  c-term may be amidated
KSMQVPFSXXXFSXAEQXXXXTVGWVERHRKMLR

SEQ ID NO: 1193 - protein, 34 aa, Artificial Sequence
  Description of Artificial Sequence: Synthetic peptide
  MOD_RES (15)..(15): Any L- or D-natural amino acid and any non-natural amino acid; see  specification as filed for detail ed description of substitutions, R-groups  and preferred embodiments
  MOD_RES (18)..(21): Any L- or D-natural or non-natural amino acid, and this range may     encompass 1 or 4 residues; see specification as filed for detailed  description of substitutions, R-groups and preferred emb
  c-term may be amidated
KSMQVPFSRCCFSFXEQXXXXTVGWVERHRKMLR

SEQ ID NO: 1194 - protein, 34 aa, Artificial Sequence
  Description of Artificial Sequence: Synthetic peptide
  MOD_RES (10)..(11): Any L- or D-natural amino acid and any non-natural amino acid; see  specification as filed for detail ed description of substitutions, R-groups  and preferred embodiments
  MOD_RES (15)..(15): Any L- or D-natural amino acid and any non-natural amino acid; see  specification as filed for detail ed description of substitutions, R-groups  and preferred embodiments
  MOD_RES (18)..(21): Any L- or D-natural or non-natural amino acid, and this range may     encompass 1 or 4 residues; see specification as filed for detailed  description of substitutions, R-groups and preferred emb
  c-term may be amidated
KSMQVPFSRXXFSFXEQXXXXTVGWVERHRKMLR

SEQ ID NO: 1195 - protein, 34 aa, Artificial Sequence
  Description of Artificial Sequence: Synthetic peptide
  MOD_RES (1)..(1): Any L- or D-natural amino acid and any non-natural amino acid; see  specification as filed for detail ed description of substitutions, R-groups  and preferred embodiments
  MOD_RES (10)..(11): Any L- or D-natural amino acid and any non-natural amino acid; see  specification as filed for detail ed description of substitutions, R-groups  and preferred embodiments
  MOD_RES (15)..(15): Any L- or D-natural amino acid and any non-natural amino acid; see  specification as filed for detail ed description of substitutions, R-groups  and preferred embodiments
  MOD_RES (18)..(21): Any L- or D-natural or non-natural amino acid, and this range may     encompass 1 or 4 residues; see specification as filed for detailed  description of substitutions, R-groups and preferred emb
  c-term may be amidated
XSMQVPFSRXXFSFXEQXXXXTVGWVERHRKMLR

SEQ ID NO: 1196 - protein, 34 aa, Artificial Sequence
  Description of Artificial Sequence: Synthetic peptide
  MOD_RES (2)..(2): Any L- or D-natural amino acid and any non-natural amino acid; see  specification as filed for detail ed description of substitutions, R-groups  and preferred embodiments
  MOD_RES (10)..(11): Any L- or D-natural amino acid and any non-natural amino acid; see  specification as filed for detail ed description of substitutions, R-groups  and preferred embodiments
  MOD_RES (15)..(15): Any L- or D-natural amino acid and any non-natural amino acid; see  specification as filed for detail ed description of substitutions, R-groups  and preferred embodiments
  MOD_RES (18)..(21): Any L- or D-natural or non-natural amino acid, and this range may     encompass 1 or 4 residues; see specification as filed for detailed  description of substitutions, R-groups and preferred emb
  c-term may be amidated
KXMQVPFSRXXFSFXEQXXXXTVGWVERHRKMLR

SEQ ID NO: 1197 - protein, 34 aa, Artificial Sequence
  Description of Artificial Sequence: Synthetic peptide
  MOD_RES (3)..(3): Any L- or D-natural amino acid and any non-natural amino acid; see  specification as filed for detail ed description of substitutions, R-groups  and preferred embodiments
  MOD_RES (10)..(11): Any L- or D-natural amino acid and any non-natural amino acid; see  specification as filed for detail ed description of substitutions, R-groups  and preferred embodiments
  MOD_RES (15)..(15): Any L- or D-natural amino acid and any non-natural amino acid; see  specification as filed for detail ed description of substitutions, R-groups  and preferred embodiments
  MOD_RES (18)..(21): Any L- or D-natural or non-natural amino acid, and this range may     encompass 1 or 4 residues; see specification as filed for detailed  description of substitutions, R-groups and preferred emb
  c-term may be amidated
KSXQVPFSRXXFSFXEQXXXXTVGWVERHRKMLR

SEQ ID NO: 1198 - protein, 34 aa, Artificial Sequence
  Description of Artificial Sequence: Synthetic peptide
  MOD_RES (4)..(4): Any L- or D-natural amino acid and any non-natural amino acid; see  specification as filed for detail ed description of substitutions, R-groups  and preferred embodiments
  MOD_RES (10)..(11): Any L- or D-natural amino acid and any non-natural amino acid; see  specification as filed for detail ed description of substitutions, R-groups  and preferred embodiments
  MOD_RES (15)..(15): Any L- or D-natural amino acid and any non-natural amino acid; see  specification as filed for detail ed description of substitutions, R-groups  and preferred embodiments
  MOD_RES (18)..(21): Any L- or D-natural or non-natural amino acid, and this range may     encompass 1 or 4 residues; see specification as filed for detailed  description of substitutions, R-groups and preferred emb
  c-term may be amidated
KSMXVPFSRXXFSFXEQXXXXTVGWVERHRKMLR

SEQ ID NO: 1199 - protein, 34 aa, Artificial Sequence
  Description of Artificial Sequence: Synthetic peptide
  MOD_RES (5)..(5): Any L- or D-natural amino acid and any non-natural amino acid; see  specification as filed for detail ed description of substitutions, R-groups  and preferred embodiments
  MOD_RES (10)..(11): Any L- or D-natural amino acid and any non-natural amino acid; see  specification as filed for detail ed description of substitutions, R-groups  and preferred embodiments
  MOD_RES (15)..(15): Any L- or D-natural amino acid and any non-natural amino acid; see  specification as filed for detail ed description of substitutions, R-groups  and preferred embodiments
  MOD_RES (18)..(21): Any L- or D-natural or non-natural amino acid, and this range may     encompass 1 or 4 residues; see specification as filed for detailed  description of substitutions, R-groups and preferred emb
  c-term may be amidated
KSMQXPFSRXXFSFXEQXXXXTVGWVERHRKMLR

SEQ ID NO: 1200 - protein, 34 aa, Artificial Sequence
  Description of Artificial Sequence: Synthetic peptide
  MOD_RES (6)..(6): Any L- or D-natural amino acid and any non-natural amino acid; see  specification as filed for detail ed description of substitutions, R-groups  and preferred embodiments
  MOD_RES (10)..(11): Any L- or D-natural amino acid and any non-natural amino acid; see  specification as filed for detail ed description of substitutions, R-groups  and preferred embodiments
  MOD_RES (15)..(15): Any L- or D-natural amino acid and any non-natural amino acid; see  specification as filed for detail ed description of substitutions, R-groups  and preferred embodiments
  MOD_RES (18)..(21): Any L- or D-natural or non-natural amino acid, and this range may     encompass 1 or 4 residues; see specification as filed for detailed  description of substitutions, R-groups and preferred emb
  c-term may be amidated
KSMQVXFSRXXFSFXEQXXXXTVGWVERHRKMLR

SEQ ID NO: 1201 - protein, 34 aa, Artificial Sequence
  Description of Artificial Sequence: Synthetic peptide
  MOD_RES (7)..(7): Any L- or D-natural amino acid and any non-natural amino acid; see  specification as filed for detail ed description of substitutions, R-groups  and preferred embodiments
  MOD_RES (10)..(11): Any L- or D-natural amino acid and any non-natural amino acid; see  specification as filed for detail ed description of substitutions, R-groups  and preferred embodiments
  MOD_RES (15)..(15): Any L- or D-natural amino acid and any non-natural amino acid; see  specification as filed for detail ed description of substitutions, R-groups  and preferred embodiments
  MOD_RES (18)..(21): Any L- or D-natural or non-natural amino acid, and this range may     encompass 1 or 4 residues; see specification as filed for detailed  description of substitutions, R-groups and preferred emb
  c-term may be amidated
KSMQVPXSRXXFSFXEQXXXXTVGWVERHRKMLR

SEQ ID NO: 1202 - protein, 34 aa, Artificial Sequence
  Description of Artificial Sequence: Synthetic peptide
  MOD_RES (8)..(8): Any L- or D-natural amino acid and any non-natural amino acid; see  specification as filed for detail ed description of substitutions, R-groups  and preferred embodiments
  MOD_RES (10)..(11): Any L- or D-natural amino acid and any non-natural amino acid; see  specification as filed for detail ed description of substitutions, R-groups  and preferred embodiments
  MOD_RES (15)..(15): Any L- or D-natural amino acid and any non-natural amino acid; see  specification as filed for detail ed description of substitutions, R-groups  and preferred embodiments
  MOD_RES (18)..(21): Any L- or D-natural or non-natural amino acid, and this range may     encompass 1 or 4 residues; see specification as filed for detailed  description of substitutions, R-groups and preferred emb
  c-term may be amidated
KSMQVPFXRXXFSFXEQXXXXTVGWVERHRKMLR

SEQ ID NO: 1203 - protein, 34 aa, Artificial Sequence
  Description of Artificial Sequence: Synthetic peptide
  MOD_RES (9)..(11): Any L- or D-natural amino acid and any non-natural amino acid; see  specification as filed for detail ed description of substitutions, R-groups  and preferred embodiments
  MOD_RES (15)..(15): Any L- or D-natural amino acid and any non-natural amino acid; see  specification as filed for detail ed description of substitutions, R-groups  and preferred embodiments
  MOD_RES (18)..(21): Any L- or D-natural or non-natural amino acid, and this range may     encompass 1 or 4 residues; see specification as filed for detailed  description of substitutions, R-groups and preferred emb
  c-term may be amidated
KSMQVPFSXXXFSFXEQXXXXTVGWVERHRKMLR

SEQ ID NO: 1204 - protein, 34 aa, Artificial Sequence
  Description of Artificial Sequence: Synthetic peptide
  MOD_RES (16)..(16): Any L- or D-natural amino acid and any non-natural amino acid; see  specification as filed for detail ed description of substitutions, R-groups  and preferred embodiments
  MOD_RES (18)..(21): Any L- or D-natural or non-natural amino acid, and this range may     encompass 1 or 4 residues; see specification as filed for detailed  description of substitutions, R-groups and preferred emb
  c-term may be amidated
KSMQVPFSRCCFSFAXQXXXXTVGWVERHRKMLR

SEQ ID NO: 1205 - protein, 34 aa, Artificial Sequence
  Description of Artificial Sequence: Synthetic peptide
  MOD_RES (10)..(11): Any L- or D-natural amino acid and any non-natural amino acid; see  specification as filed for detail ed description of substitutions, R-groups  and preferred embodiments
  MOD_RES (16)..(16): Any L- or D-natural amino acid and any non-natural amino acid; see  specification as filed for detail ed description of substitutions, R-groups  and preferred embodiments
  MOD_RES (18)..(21): Any L- or D-natural or non-natural amino acid, and this range may     encompass 1 or 4 residues; see specification as filed for detailed  description of substitutions, R-groups and preferred emb
  c-term may be amidated
KSMQVPFSRXXFSFAXQXXXXTVGWVERHRKMLR

SEQ ID NO: 1206 - protein, 34 aa, Artificial Sequence
  Description of Artificial Sequence: Synthetic peptide
  MOD_RES (1)..(1): Any L- or D-natural amino acid and any non-natural amino acid; see  specification as filed for detail ed description of substitutions, R-groups  and preferred embodiments
  MOD_RES (10)..(11): Any L- or D-natural amino acid and any non-natural amino acid; see  specification as filed for detail ed description of substitutions, R-groups  and preferred embodiments
  MOD_RES (16)..(16): Any L- or D-natural amino acid and any non-natural amino acid; see  specification as filed for detail ed description of substitutions, R-groups  and preferred embodiments
  MOD_RES (18)..(21): Any L- or D-natural or non-natural amino acid, and this range may     encompass 1 or 4 residues; see specification as filed for detailed  description of substitutions, R-groups and preferred emb
  c-term may be amidated
XSMQVPFSRXXFSFAXQXXXXTVGWVERHRKMLR

SEQ ID NO: 1207 - protein, 34 aa, Artificial Sequence
  Description of Artificial Sequence: Synthetic peptide
  MOD_RES (2)..(2): Any L- or D-natural amino acid and any non-natural amino acid; see  specification as filed for detail ed description of substitutions, R-groups  and preferred embodiments
  MOD_RES (10)..(11): Any L- or D-natural amino acid and any non-natural amino acid; see  specification as filed for detail ed description of substitutions, R-groups  and preferred embodiments
  MOD_RES (16)..(16): Any L- or D-natural amino acid and any non-natural amino acid; see  specification as filed for detail ed description of substitutions, R-groups  and preferred embodiments
  MOD_RES (18)..(21): Any L- or D-natural or non-natural amino acid, and this range may     encompass 1 or 4 residues; see specification as filed for detailed  description of substitutions, R-groups and preferred emb
  c-term may be amidated
KXMQVPFSRXXFSFAXQXXXXTVGWVERHRKMLR

SEQ ID NO: 1208 - protein, 34 aa, Artificial Sequence
  Description of Artificial Sequence: Synthetic peptide
  MOD_RES (3)..(3): Any L- or D-natural amino acid and any non-natural amino acid; see  specification as filed for detail ed description of substitutions, R-groups  and preferred embodiments
  MOD_RES (10)..(11): Any L- or D-natural amino acid and any non-natural amino acid; see  specification as filed for detail ed description of substitutions, R-groups  and preferred embodiments
  MOD_RES (16)..(16): Any L- or D-natural amino acid and any non-natural amino acid; see  specification as filed for detail ed description of substitutions, R-groups  and preferred embodiments
  MOD_RES (18)..(21): Any L- or D-natural or non-natural amino acid, and this range may     encompass 1 or 4 residues; see specification as filed for detailed  description of substitutions, R-groups and preferred emb
  c-term may be amidated
KSXQVPFSRXXFSFAXQXXXXTVGWVERHRKMLR

SEQ ID NO: 1209 - protein, 34 aa, Artificial Sequence
  Description of Artificial Sequence: Synthetic peptide
  MOD_RES (4)..(4): Any L- or D-natural amino acid and any non-natural amino acid; see  specification as filed for detail ed description of substitutions, R-groups  and preferred embodiments
  MOD_RES (10)..(11): Any L- or D-natural amino acid and any non-natural amino acid; see  specification as filed for detail ed description of substitutions, R-groups  and preferred embodiments
  MOD_RES (16)..(16): Any L- or D-natural amino acid and any non-natural amino acid; see  specification as filed for detail ed description of substitutions, R-groups  and preferred embodiments
  MOD_RES (18)..(21): Any L- or D-natural or non-natural amino acid, and this range may     encompass 1 or 4 residues; see specification as filed for detailed  description of substitutions, R-groups and preferred emb
  c-term may be amidated
KSMXVPFSRXXFSFAXQXXXXTVGWVERHRKMLR

SEQ ID NO: 1210 - protein, 34 aa, Artificial Sequence
  Description of Artificial Sequence: Synthetic peptide
  MOD_RES (17)..(17): Any L- or D-natural amino acid and any non-natural amino acid; see  specification as filed for detail ed description of substitutions, R-groups  and preferred embodiments
  MOD_RES (18)..(21): Any L- or D-natural or non-natural amino acid, and this range may     encompass 1 or 4 residues; see specification as filed for detailed  description of substitutions, R-groups and preferred emb
  c-term may be amidated
KSMQVPFSRCCFSFAEXXXXXTVGWVERHRKMLR

SEQ ID NO: 1211 - protein, 34 aa, Artificial Sequence
  Description of Artificial Sequence: Synthetic peptide
  MOD_RES (10)..(11): Any L- or D-natural amino acid and any non-natural amino acid; see  specification as filed for detail ed description of substitutions, R-groups  and preferred embodiments
  MOD_RES (17)..(17): Any L- or D-natural amino acid and any non-natural amino acid; see  specification as filed for detail ed description of substitutions, R-groups  and preferred embodiments
  MOD_RES (18)..(21): Any L- or D-natural or non-natural amino acid, and this range may     encompass 1 or 4 residues; see specification as filed for detailed  description of substitutions, R-groups and preferred emb
  c-term may be amidated
KSMQVPFSRXXFSFAEXXXXXTVGWVERHRKMLR

SEQ ID NO: 1212 - protein, 34 aa, Artificial Sequence
  Description of Artificial Sequence: Synthetic peptide
  MOD_RES (1)..(1): Any L- or D-natural amino acid and any non-natural amino acid; see  specification as filed for detail ed description of substitutions, R-groups  and preferred embodiments
  MOD_RES (10)..(11): Any L- or D-natural amino acid and any non-natural amino acid; see  specification as filed for detail ed description of substitutions, R-groups  and preferred embodiments
  MOD_RES (17)..(17): Any L- or D-natural amino acid and any non-natural amino acid; see  specification as filed for detail ed description of substitutions, R-groups  and preferred embodiments
  MOD_RES (18)..(21): Any L- or D-natural or non-natural amino acid, and this range may     encompass 1 or 4 residues; see specification as filed for detailed  description of substitutions, R-groups and preferred emb
  c-term may be amidated
XSMQVPFSRXXFSFAEXXXXXTVGWVERHRKMLR

SEQ ID NO: 1213 - protein, 34 aa, Artificial Sequence
  Description of Artificial Sequence: Synthetic peptide
  MOD_RES (2)..(2): Any L- or D-natural amino acid and any non-natural amino acid; see  specification as filed for detail ed description of substitutions, R-groups  and preferred embodiments
  MOD_RES (10)..(11): Any L- or D-natural amino acid and any non-natural amino acid; see  specification as filed for detail ed description of substitutions, R-groups  and preferred embodiments
  MOD_RES (17)..(17): Any L- or D-natural amino acid and any non-natural amino acid; see  specification as filed for detail ed description of substitutions, R-groups  and preferred embodiments
  MOD_RES (18)..(21): Any L- or D-natural or non-natural amino acid, and this range may     encompass 1 or 4 residues; see specification as filed for detailed  description of substitutions, R-groups and preferred emb
  c-term may be amidated
KXMQVPFSRXXFSFAEXXXXXTVGWVERHRKMLR

SEQ ID NO: 1214 - protein, 34 aa, Artificial Sequence
  Description of Artificial Sequence: Synthetic peptide
  MOD_RES (3)..(3): Any L- or D-natural amino acid and any non-natural amino acid; see  specification as filed for detail ed description of substitutions, R-groups  and preferred embodiments
  MOD_RES (10)..(11): Any L- or D-natural amino acid and any non-natural amino acid; see  specification as filed for detail ed description of substitutions, R-groups  and preferred embodiments
  MOD_RES (17)..(17): Any L- or D-natural amino acid and any non-natural amino acid; see  specification as filed for detail ed description of substitutions, R-groups  and preferred embodiments
  MOD_RES (18)..(21): Any L- or D-natural or non-natural amino acid, and this range may     encompass 1 or 4 residues; see specification as filed for detailed  description of substitutions, R-groups and preferred emb
  c-term may be amidated
KSXQVPFSRXXFSFAEXXXXXTVGWVERHRKMLR

SEQ ID NO: 1215 - protein, 34 aa, Artificial Sequence
  Description of Artificial Sequence: Synthetic peptide
  MOD_RES (4)..(4): Any L- or D-natural amino acid and any non-natural amino acid; see  specification as filed for detail ed description of substitutions, R-groups  and preferred embodiments
  MOD_RES (10)..(11): Any L- or D-natural amino acid and any non-natural amino acid; see  specification as filed for detail ed description of substitutions, R-groups  and preferred embodiments
  MOD_RES (17)..(17): Any L- or D-natural amino acid and any non-natural amino acid; see  specification as filed for detail ed description of substitutions, R-groups  and preferred embodiments
  MOD_RES (18)..(21): Any L- or D-natural or non-natural amino acid, and this range may     encompass 1 or 4 residues; see specification as filed for detailed  description of substitutions, R-groups and preferred emb
  c-term may be amidated
KSMXVPFSRXXFSFAEXXXXXTVGWVERHRKMLR

SEQ ID NO: 1216 - protein, 34 aa, Artificial Sequence
  Description of Artificial Sequence: Synthetic peptide
  MOD_RES (5)..(5): Any L- or D-natural amino acid and any non-natural amino acid; see  specification as filed for detail ed description of substitutions, R-groups  and preferred embodiments
  MOD_RES (10)..(11): Any L- or D-natural amino acid and any non-natural amino acid; see  specification as filed for detail ed description of substitutions, R-groups  and preferred embodiments
  MOD_RES (17)..(17): Any L- or D-natural amino acid and any non-natural amino acid; see  specification as filed for detail ed description of substitutions, R-groups  and preferred embodiments
  MOD_RES (18)..(21): Any L- or D-natural or non-natural amino acid, and this range may     encompass 1 or 4 residues; see specification as filed for detailed  description of substitutions, R-groups and preferred emb
  c-term may be amidated
KSMQXPFSRXXFSFAEXXXXXTVGWVERHRKMLR

SEQ ID NO: 1217 - protein, 34 aa, Artificial Sequence
  Description of Artificial Sequence: Synthetic peptide
  MOD_RES (6)..(6): Any L- or D-natural amino acid and any non-natural amino acid; see  specification as filed for detail ed description of substitutions, R-groups  and preferred embodiments
  MOD_RES (10)..(11): Any L- or D-natural amino acid and any non-natural amino acid; see  specification as filed for detail ed description of substitutions, R-groups  and preferred embodiments
  MOD_RES (17)..(17): Any L- or D-natural amino acid and any non-natural amino acid; see  specification as filed for detail ed description of substitutions, R-groups  and preferred embodiments
  MOD_RES (18)..(21): Any L- or D-natural or non-natural amino acid, and this range may     encompass 1 or 4 residues; see specification as filed for detailed  description of substitutions, R-groups and preferred emb
  c-term may be amidated
KSMQVXFSRXXFSFAEXXXXXTVGWVERHRKMLR

SEQ ID NO: 1218 - protein, 34 aa, Artificial Sequence
  Description of Artificial Sequence: Synthetic peptide
  MOD_RES (7)..(7): Any L- or D-natural amino acid and any non-natural amino acid; see  specification as filed for detail ed description of substitutions, R-groups  and preferred embodiments
  MOD_RES (10)..(11): Any L- or D-natural amino acid and any non-natural amino acid; see  specification as filed for detail ed description of substitutions, R-groups  and preferred embodiments
  MOD_RES (17)..(17): Any L- or D-natural amino acid and any non-natural amino acid; see  specification as filed for detail ed description of substitutions, R-groups  and preferred embodiments
  MOD_RES (18)..(21): Any L- or D-natural or non-natural amino acid, and this range may     encompass 1 or 4 residues; see specification as filed for detailed  description of substitutions, R-groups and preferred emb
  c-term may be amidated
KSMQVPXSRXXFSFAEXXXXXTVGWVERHRKMLR

SEQ ID NO: 1219 - protein, 34 aa, Artificial Sequence
  Description of Artificial Sequence: Synthetic peptide
  MOD_RES (8)..(8): Any L- or D-natural amino acid and any non-natural amino acid; see  specification as filed for detail ed description of substitutions, R-groups  and preferred embodiments
  MOD_RES (10)..(11): Any L- or D-natural amino acid and any non-natural amino acid; see  specification as filed for detail ed description of substitutions, R-groups  and preferred embodiments
  MOD_RES (17)..(17): Any L- or D-natural amino acid and any non-natural amino acid; see  specification as filed for detail ed description of substitutions, R-groups  and preferred embodiments
  MOD_RES (18)..(21): Any L- or D-natural or non-natural amino acid, and this range may     encompass 1 or 4 residues; see specification as filed for detailed  description of substitutions, R-groups and preferred emb
  c-term may be amidated
KSMQVPFXRXXFSFAEXXXXXTVGWVERHRKMLR

SEQ ID NO: 1220 - protein, 34 aa, Artificial Sequence
  Description of Artificial Sequence: Synthetic peptide
  MOD_RES (9)..(11): Any L- or D-natural amino acid and any non-natural amino acid; see  specification as filed for detail ed description of substitutions, R-groups  and preferred embodiments
  MOD_RES (17)..(17): Any L- or D-natural amino acid and any non-natural amino acid; see  specification as filed for detail ed description of substitutions, R-groups  and preferred embodiments
  MOD_RES (18)..(21): Any L- or D-natural or non-natural amino acid, and this range may     encompass 1 or 4 residues; see specification as filed for detailed  description of substitutions, R-groups and preferred emb
  c-term may be amidated
KSMQVPFSXXXFSFAEXXXXXTVGWVERHRKMLR

SEQ ID NO: 1221 - protein, 24 aa, Artificial Sequence
  Description of Artificial Sequence: Synthetic peptide
  c-term may be amidated
AYRNTSSICSNEGLIFKLKRGKEA

SEQ ID NO: 1222 - protein, 24 aa, Artificial Sequence
  Description of Artificial Sequence: Synthetic peptide
  c-term may be amidated
AYRNTSSICSNEGLIFKLKRGKEA

SEQ ID NO: 1223 - protein, 24 aa, Artificial Sequence
  Description of Artificial Sequence: Synthetic peptide
  c-term may be amidated
AYRNTSSICSNEGLIFKLKRGKEA

SEQ ID NO: 1224 - protein, 25 aa, Artificial Sequence
  Description of Artificial Sequence: Synthetic peptide
  c-term may be amidated
KSMQVPFSRCCFSFAEQEIPLRAIL

SEQ ID NO: 1225 - protein, 25 aa, Artificial Sequence
  Description of Artificial Sequence: Synthetic peptide
  MOD_RES (10)..(11): Any L- or D-natural amino acid and any non-natural amino acid; see  specification as filed for detail ed description of substitutions, R-groups  and preferred embodiments
  c-term may be amidated
KSMQVPFSRXXFSFAEQEIPLRAIL

SEQ ID NO: 1226 - protein, 25 aa, Artificial Sequence
  Description of Artificial Sequence: Synthetic peptide
  c-term may be amidated
KSMQVPFSRCCFSFAEQEIPLRAIL

SEQ ID NO: 1227 - protein, 25 aa, Artificial Sequence
  Description of Artificial Sequence: Synthetic peptide
  MOD_RES (10)..(11): Any L- or D-natural amino acid and any non-natural amino acid; see  specification as filed for detail ed description of substitutions, R-groups  and preferred embodiments
  c-term may be amidated
KSMQVPFSRXXFSFAEQEIPLRAIL

SEQ ID NO: 1228 - protein, 34 aa, Artificial Sequence; identical to SEQ ID NO: 987
  Description of Artificial Sequence: Synthetic peptide
  c-term may be amidated

SEQ ID NO: 1229 - protein, 33 aa, Artificial Sequence
  Description of Artificial Sequence: Synthetic peptide
  c-term may be amidated
ASNEGLIFKLKRGKEACALDTVGWVQRHRKMLR

SEQ ID NO: 1230 - protein, 33 aa, Artificial Sequence; identical to SEQ ID NO: 1229
  Description of Artificial Sequence: Synthetic peptide
  c-term may be amidated

SEQ ID NO: 1231 - protein, 33 aa, Artificial Sequence; identical to SEQ ID NO: 1229
  Description of Artificial Sequence: Synthetic peptide
  c-term may be amidated

SEQ ID NO: 1232 - protein, 33 aa, Artificial Sequence; identical to SEQ ID NO: 1229
  Description of Artificial Sequence: Synthetic peptide
  c-term may be amidated

SEQ ID NO: 1233 - protein, 33 aa, Artificial Sequence; identical to SEQ ID NO: 1229
  Description of Artificial Sequence: Synthetic peptide
  c-term may be amidated

SEQ ID NO: 1234 - protein, 33 aa, Artificial Sequence; identical to SEQ ID NO: 1229
  Description of Artificial Sequence: Synthetic peptide
  c-term may be amidated

SEQ ID NO: 1235 - protein, 31 aa, Artificial Sequence; identical to SEQ ID NO: 1105
  Description of Artificial Sequence: Synthetic peptide
  MOD_RES (15)..(18): Any L- or D-natural or non-natural amino acid, and this range may     encompass 1 or 4 residues; see specification as filed for detailed  description of substitutions, R-groups and preferred emb
  c-term may be amidated

SEQ ID NO: 1236 - protein, 31 aa, Artificial Sequence; identical to SEQ ID NO: 1106
  Description of Artificial Sequence: Synthetic peptide
  MOD_RES (10)..(11): Any L- or D-natural amino acid and any non-natural amino acid; see  specification as filed for detail ed description of substitutions, R-groups  and preferred embodiments
  MOD_RES (15)..(18): Any L- or D-natural or non-natural amino acid, and this range may     encompass 1 or 4 residues; see specification as filed for detailed  description of substitutions, R-groups and preferred emb
  c-term may be amidated

SEQ ID NO: 1237 - protein, 31 aa, Artificial Sequence; identical to SEQ ID NO: 1107
  Description of Artificial Sequence: Synthetic peptide
  MOD_RES (1)..(1): Any L- or D-natural amino acid and any non-natural amino acid; see  specification as filed for detail ed description of substitutions, R-groups  and preferred embodiments
  MOD_RES (10)..(11): Any L- or D-natural amino acid and any non-natural amino acid; see  specification as filed for detail ed description of substitutions, R-groups  and preferred embodiments
  MOD_RES (15)..(18): Any L- or D-natural or non-natural amino acid, and this range may     encompass 1 or 4 residues; see specification as filed for detailed  description of substitutions, R-groups and preferred emb
  c-term may be amidated

SEQ ID NO: 1238 - protein, 31 aa, Artificial Sequence; identical to SEQ ID NO: 1108
  Description of Artificial Sequence: Synthetic peptide
  MOD_RES (2)..(2): Any L- or D-natural amino acid and any non-natural amino acid; see  specification as filed for detail ed description of substitutions, R-groups  and preferred embodiments
  MOD_RES (10)..(11): Any L- or D-natural amino acid and any non-natural amino acid; see  specification as filed for detail ed description of substitutions, R-groups  and preferred embodiments
  MOD_RES (15)..(18): Any L- or D-natural or non-natural amino acid, and this range may     encompass 1 or 4 residues; see specification as filed for detailed  description of substitutions, R-groups and preferred emb
  c-term may be amidated

SEQ ID NO: 1239 - protein, 31 aa, Artificial Sequence; identical to SEQ ID NO: 1109
  Description of Artificial Sequence: Synthetic peptide
  MOD_RES (3)..(3): Any L- or D-natural amino acid and any non-natural amino acid; see  specification as filed for detail ed description of substitutions, R-groups  and preferred embodiments
  MOD_RES (10)..(11): Any L- or D-natural amino acid and any non-natural amino acid; see  specification as filed for detail ed description of substitutions, R-groups  and preferred embodiments
  MOD_RES (15)..(18): Any L- or D-natural or non-natural amino acid, and this range may     encompass 1 or 4 residues; see specification as filed for detailed  description of substitutions, R-groups and preferred emb
  c-term may be amidated

SEQ ID NO: 1240 - protein, 31 aa, Artificial Sequence; identical to SEQ ID NO: 1110
  Description of Artificial Sequence: Synthetic peptide
  MOD_RES (4)..(4): Any L- or D-natural amino acid and any non-natural amino acid; see  specification as filed for detail ed description of substitutions, R-groups  and preferred embodiments
  MOD_RES (10)..(11): Any L- or D-natural amino acid and any non-natural amino acid; see  specification as filed for detail ed description of substitutions, R-groups  and preferred embodiments
  MOD_RES (15)..(18): Any L- or D-natural or non-natural amino acid, and this range may     encompass 1 or 4 residues; see specification as filed for detailed  description of substitutions, R-groups and preferred emb
  c-term may be amidated

SEQ ID NO: 1241 - protein, 31 aa, Artificial Sequence; identical to SEQ ID NO: 1111
  Description of Artificial Sequence: Synthetic peptide
  MOD_RES (5)..(5): Any L- or D-natural amino acid and any non-natural amino acid; see  specification as filed for detail ed description of substitutions, R-groups  and preferred embodiments
  MOD_RES (10)..(11): Any L- or D-natural amino acid and any non-natural amino acid; see  specification as filed for detail ed description of substitutions, R-groups  and preferred embodiments
  MOD_RES (15)..(18): Any L- or D-natural or non-natural amino acid, and this range may     encompass 1 or 4 residues; see specification as filed for detailed  description of substitutions, R-groups and preferred emb
  c-term may be amidated

SEQ ID NO: 1242 - protein, 31 aa, Artificial Sequence; identical to SEQ ID NO: 1112
  Description of Artificial Sequence: Synthetic peptide
  MOD_RES (6)..(6): Any L- or D-natural amino acid and any non-natural amino acid; see  specification as filed for detail ed description of substitutions, R-groups  and preferred embodiments
  MOD_RES (10)..(11): Any L- or D-natural amino acid and any non-natural amino acid; see  specification as filed for detail ed description of substitutions, R-groups  and preferred embodiments
  MOD_RES (15)..(18): Any L- or D-natural or non-natural amino acid, and this range may     encompass 1 or 4 residues; see specification as filed for detailed  description of substitutions, R-groups and preferred emb
  c-term may be amidated

SEQ ID NO: 1243 - protein, 31 aa, Artificial Sequence; identical to SEQ ID NO: 1113
  Description of Artificial Sequence: Synthetic peptide
  MOD_RES (7)..(7): Any L- or D-natural amino acid and any non-natural amino acid; see  specification as filed for detail ed description of substitutions, R-groups  and preferred embodiments
  MOD_RES (10)..(11): Any L- or D-natural amino acid and any non-natural amino acid; see  specification as filed for detail ed description of substitutions, R-groups  and preferred embodiments
  MOD_RES (15)..(18): Any L- or D-natural or non-natural amino acid, and this range may     encompass 1 or 4 residues; see specification as filed for detailed  description of substitutions, R-groups and preferred emb
  c-term may be amidated

SEQ ID NO: 1244 - protein, 31 aa, Artificial Sequence; identical to SEQ ID NO: 1114
  Description of Artificial Sequence: Synthetic peptide
  MOD_RES (8)..(8): Any L- or D-natural amino acid and any non-natural amino acid; see  specification as filed for detail ed description of substitutions, R-groups  and preferred embodiments
  MOD_RES (10)..(11): Any L- or D-natural amino acid and any non-natural amino acid; see  specification as filed for detail ed description of substitutions, R-groups  and preferred embodiments
  MOD_RES (15)..(18): Any L- or D-natural or non-natural amino acid, and this range may     encompass 1 or 4 residues; see specification as filed for detailed  description of substitutions, R-groups and preferred emb
  c-term may be amidated

SEQ ID NO: 1245 - protein, 31 aa, Artificial Sequence; identical to SEQ ID NO: 1115
  Description of Artificial Sequence: Synthetic peptide
  MOD_RES (9)..(11): Any L- or D-natural amino acid and any non-natural amino acid; see  specification as filed for detail ed description of substitutions, R-groups  and preferred embodiments
  MOD_RES (15)..(18): Any L- or D-natural or non-natural amino acid, and this range may     encompass 1 or 4 residues; see specification as filed for detailed  description of substitutions, R-groups and preferred emb
  c-term may be amidated

SEQ ID NO: 1246 - protein, 31 aa, Artificial Sequence; identical to SEQ ID NO: 1116
  Description of Artificial Sequence: Synthetic peptide
  MOD_RES (12)..(12): Any L- or D-natural amino acid and any non-natural amino acid; see  specification as filed for detail ed description of substitutions, R-groups  and preferred embodiments
  MOD_RES (15)..(18): Any L- or D-natural or non-natural amino acid, and this range may     encompass 1 or 4 residues; see specification as filed for detailed  description of substitutions, R-groups and preferred emb
  c-term may be amidated

SEQ ID NO: 1247 - protein, 31 aa, Artificial Sequence; identical to SEQ ID NO: 1117
  Description of Artificial Sequence: Synthetic peptide
  MOD_RES (10)..(12): Any L- or D-natural amino acid and any non-natural amino acid; see  specification as filed for detail ed description of substitutions, R-groups  and preferred embodiments
  MOD_RES (15)..(18): Any L- or D-natural or non-natural amino acid, and this range may     encompass 1 or 4 residues; see specification as filed for detailed  description of substitutions, R-groups and preferred emb
  c-term may be amidated

SEQ ID NO: 1248 - protein, 31 aa, Artificial Sequence; identical to SEQ ID NO: 1118
  Description of Artificial Sequence: Synthetic peptide
  MOD_RES (1)..(1): Any L- or D-natural amino acid and any non-natural amino acid; see  specification as filed for detail ed description of substitutions, R-groups  and preferred embodiments
  MOD_RES (10)..(12): Any L- or D-natural amino acid and any non-natural amino acid; see  specification as filed for detail ed description of substitutions, R-groups  and preferred embodiments
  MOD_RES (15)..(18): Any L- or D-natural or non-natural amino acid, and this range may     encompass 1 or 4 residues; see specification as filed for detailed  description of substitutions, R-groups and preferred emb
  c-term may be amidated

SEQ ID NO: 1249 - protein, 31 aa, Artificial Sequence; identical to SEQ ID NO: 1119
  Description of Artificial Sequence: Synthetic peptide
  MOD_RES (2)..(2): Any L- or D-natural amino acid and any non-natural amino acid; see  specification as filed for detail ed description of substitutions, R-groups  and preferred embodiments
  MOD_RES (10)..(12): Any L- or D-natural amino acid and any non-natural amino acid; see  specification as filed for detail ed description of substitutions, R-groups  and preferred embodiments
  MOD_RES (15)..(18): Any L- or D-natural or non-natural amino acid, and this range may     encompass 1 or 4 residues; see specification as filed for detailed  description of substitutions, R-groups and preferred emb
  c-term may be amidated

SEQ ID NO: 1250 - protein, 31 aa, Artificial Sequence; identical to SEQ ID NO: 1120
  Description of Artificial Sequence: Synthetic peptide
  MOD_RES (3)..(3): Any L- or D-natural amino acid and any non-natural amino acid; see  specification as filed for detail ed description of substitutions, R-groups  and preferred embodiments
  MOD_RES (10)..(12): Any L- or D-natural amino acid and any non-natural amino acid; see  specification as filed for detail ed description of substitutions, R-groups  and preferred embodiments
  MOD_RES (15)..(18): Any L- or D-natural or non-natural amino acid, and this range may     encompass 1 or 4 residues; see specification as filed for detailed  description of substitutions, R-groups and preferred emb
  c-term may be amidated

SEQ ID NO: 1251 - protein, 31 aa, Artificial Sequence; identical to SEQ ID NO: 1121
  Description of Artificial Sequence: Synthetic peptide
  MOD_RES (4)..(4): Any L- or D-natural amino acid and any non-natural amino acid; see  specification as filed for detail ed description of substitutions, R-groups  and preferred embodiments
  MOD_RES (10)..(12): Any L- or D-natural amino acid and any non-natural amino acid; see  specification as filed for detail ed description of substitutions, R-groups  and preferred embodiments
  MOD_RES (15)..(18): Any L- or D-natural or non-natural amino acid, and this range may     encompass 1 or 4 residues; see specification as filed for detailed  description of substitutions, R-groups and preferred emb
  c-term may be amidated

SEQ ID NO: 1252 - protein, 31 aa, Artificial Sequence; identical to SEQ ID NO: 1122
  Description of Artificial Sequence: Synthetic peptide
  MOD_RES (5)..(5): Any L- or D-natural amino acid and any non-natural amino acid; see  specification as filed for detail ed description of substitutions, R-groups  and preferred embodiments
  MOD_RES (10)..(12): Any L- or D-natural amino acid and any non-natural amino acid; see  specification as filed for detail ed description of substitutions, R-groups  and preferred embodiments
  MOD_RES (15)..(18): Any L- or D-natural or non-natural amino acid, and this range may     encompass 1 or 4 residues; see specification as filed for detailed  description of substitutions, R-groups and preferred emb
  c-term may be amidated

SEQ ID NO: 1253 - protein, 31 aa, Artificial Sequence; identical to SEQ ID NO: 1123
  Description of Artificial Sequence: Synthetic peptide
  MOD_RES (6)..(6): Any L- or D-natural amino acid and any non-natural amino acid; see  specification as filed for detail ed description of substitutions, R-groups  and preferred embodiments
  MOD_RES (10)..(12): Any L- or D-natural amino acid and any non-natural amino acid; see  specification as filed for detail ed description of substitutions, R-groups  and preferred embodiments
  MOD_RES (15)..(18): Any L- or D-natural or non-natural amino acid, and this range may     encompass 1 or 4 residues; see specification as filed for detailed  description of substitutions, R-groups and preferred emb
  c-term may be amidated

SEQ ID NO: 1254 - protein, 31 aa, Artificial Sequence; identical to SEQ ID NO: 1124
  Description of Artificial Sequence: Synthetic peptide
  MOD_RES (7)..(7): Any L- or D-natural amino acid and any non-natural amino acid; see  specification as filed for detail ed description of substitutions, R-groups  and preferred embodiments
  MOD_RES (10)..(12): Any L- or D-natural amino acid and any non-natural amino acid; see  specification as filed for detail ed description of substitutions, R-groups  and preferred embodiments
  MOD_RES (15)..(18): Any L- or D-natural or non-natural amino acid, and this range may     encompass 1 or 4 residues; see specification as filed for detailed  description of substitutions, R-groups and preferred emb
  c-term may be amidated

SEQ ID NO: 1255 - protein, 31 aa, Artificial Sequence; identical to SEQ ID NO: 1125
  Description of Artificial Sequence: Synthetic peptide
  MOD_RES (8)..(8): Any L- or D-natural amino acid and any non-natural amino acid; see  specification as filed for detail ed description of substitutions, R-groups  and preferred embodiments
  MOD_RES (10)..(12): Any L- or D-natural amino acid and any non-natural amino acid; see  specification as filed for detail ed description of substitutions, R-groups  and preferred embodiments
  MOD_RES (15)..(18): Any L- or D-natural or non-natural amino acid, and this range may     encompass 1 or 4 residues; see specification as filed for detailed  description of substitutions, R-groups and preferred emb
  c-term may be amidated

SEQ ID NO: 1256 - protein, 31 aa, Artificial Sequence; identical to SEQ ID NO: 1126
  Description of Artificial Sequence: Synthetic peptide
  MOD_RES (9)..(12): Any L- or D-natural amino acid and any non-natural amino acid; see  specification as filed for detail ed description of substitutions, R-groups  and preferred embodiments
  MOD_RES (15)..(18): Any L- or D-natural or non-natural amino acid, and this range may     encompass 1 or 4 residues; see specification as filed for detailed  description of substitutions, R-groups and preferred emb
  c-term may be amidated

SEQ ID NO: 1257 - protein, 31 aa, Artificial Sequence; identical to SEQ ID NO: 1127
  Description of Artificial Sequence: Synthetic peptide
  MOD_RES (13)..(13): Any L- or D-natural amino acid and any non-natural amino acid; see  specification as filed for detail ed description of substitutions, R-groups  and preferred embodiments
  MOD_RES (15)..(18): Any L- or D-natural or non-natural amino acid, and this range may     encompass 1 or 4 residues; see specification as filed for detailed  description of substitutions, R-groups and preferred emb
  c-term may be amidated

SEQ ID NO: 1258 - protein, 31 aa, Artificial Sequence; identical to SEQ ID NO: 1128
  Description of Artificial Sequence: Synthetic peptide
  MOD_RES (10)..(11): Any L- or D-natural amino acid and any non-natural amino acid; see  specification as filed for detail ed description of substitutions, R-groups  and preferred embodiments
  MOD_RES (13)..(13): Any L- or D-natural amino acid and any non-natural amino acid; see  specification as filed for detail ed description of substitutions, R-groups  and preferred embodiments
  MOD_RES (15)..(18): Any L- or D-natural or non-natural amino acid, and this range may     encompass 1 or 4 residues; see specification as filed for detailed  description of substitutions, R-groups and preferred emb
  c-term may be amidated

SEQ ID NO: 1259 - protein, 31 aa, Artificial Sequence; identical to SEQ ID NO: 1129
  Description of Artificial Sequence: Synthetic peptide
  MOD_RES (1)..(1): Any L- or D-natural amino acid and any non-natural amino acid; see  specification as filed for detail ed description of substitutions, R-groups  and preferred embodiments
  MOD_RES (10)..(11): Any L- or D-natural amino acid and any non-natural amino acid; see  specification as filed for detail ed description of substitutions, R-groups  and preferred embodiments
  MOD_RES (13)..(13): Any L- or D-natural amino acid and any non-natural amino acid; see  specification as filed for detail ed description of substitutions, R-groups  and preferred embodiments
  MOD_RES (15)..(18): Any L- or D-natural or non-natural amino acid, and this range may     encompass 1 or 4 residues; see specification as filed for detailed  description of substitutions, R-groups and preferred emb
  c-term may be amidated

SEQ ID NO: 1260 - protein, 31 aa, Artificial Sequence; identical to SEQ ID NO: 1130
  Description of Artificial Sequence: Synthetic peptide
  MOD_RES (2)..(2): Any L- or D-natural amino acid and any non-natural amino acid; see  specification as filed for detail ed description of substitutions, R-groups  and preferred embodiments
  MOD_RES (10)..(11): Any L- or D-natural amino acid and any non-natural amino acid; see  specification as filed for detail ed description of substitutions, R-groups  and preferred embodiments
  MOD_RES (13)..(13): Any L- or D-natural amino acid and any non-natural amino acid; see  specification as filed for detail ed description of substitutions, R-groups  and preferred embodiments
  MOD_RES (15)..(18): Any L- or D-natural or non-natural amino acid, and this range may     encompass 1 or 4 residues; see specification as filed for detailed  description of substitutions, R-groups and preferred emb
  c-term may be amidated

SEQ ID NO: 1261 - protein, 31 aa, Artificial Sequence; identical to SEQ ID NO: 1131
  Description of Artificial Sequence: Synthetic peptide
  MOD_RES (3)..(3): Any L- or D-natural amino acid and any non-natural amino acid; see  specification as filed for detail ed description of substitutions, R-groups  and preferred embodiments
  MOD_RES (10)..(11): Any L- or D-natural amino acid and any non-natural amino acid; see  specification as filed for detail ed description of substitutions, R-groups  and preferred embodiments
  MOD_RES (13)..(13): Any L- or D-natural amino acid and any non-natural amino acid; see  specification as filed for detail ed description of substitutions, R-groups  and preferred embodiments
  MOD_RES (15)..(18): Any L- or D-natural or non-natural amino acid, and this range may     encompass 1 or 4 residues; see specification as filed for detailed  description of substitutions, R-groups and preferred emb
  c-term may be amidated

SEQ ID NO: 1262 - protein, 31 aa, Artificial Sequence; identical to SEQ ID NO: 1132
  Description of Artificial Sequence: Synthetic peptide
  MOD_RES (4)..(4): Any L- or D-natural amino acid and any non-natural amino acid; see  specification as filed for detail ed description of substitutions, R-groups  and preferred embodiments
  MOD_RES (10)..(11): Any L- or D-natural amino acid and any non-natural amino acid; see  specification as filed for detail ed description of substitutions, R-groups  and preferred embodiments
  MOD_RES (13)..(13): Any L- or D-natural amino acid and any non-natural amino acid; see  specification as filed for detail ed description of substitutions, R-groups  and preferred embodiments
  MOD_RES (15)..(18): Any L- or D-natural or non-natural amino acid, and this range may     encompass 1 or 4 residues; see specification as filed for detailed  description of substitutions, R-groups and preferred emb
  c-term may be amidated

SEQ ID NO: 1263 - protein, 31 aa, Artificial Sequence; identical to SEQ ID NO: 1133
  Description of Artificial Sequence: Synthetic peptide
  MOD_RES (5)..(5): Any L- or D-natural amino acid and any non-natural amino acid; see  specification as filed for detail ed description of substitutions, R-groups  and preferred embodiments
  MOD_RES (10)..(11): Any L- or D-natural amino acid and any non-natural amino acid; see  specification as filed for detail ed description of substitutions, R-groups  and preferred embodiments
  MOD_RES (13)..(13): Any L- or D-natural amino acid and any non-natural amino acid; see  specification as filed for detail ed description of substitutions, R-groups  and preferred embodiments
  MOD_RES (15)..(18): Any L- or D-natural or non-natural amino acid, and this range may     encompass 1 or 4 residues; see specification as filed for detailed  description of substitutions, R-groups and preferred emb
  c-term may be amidated

SEQ ID NO: 1264 - protein, 31 aa, Artificial Sequence; identical to SEQ ID NO: 1134
  Description of Artificial Sequence: Synthetic peptide
  MOD_RES (6)..(6): Any L- or D-natural amino acid and any non-natural amino acid; see  specification as filed for detail ed description of substitutions, R-groups  and preferred embodiments
  MOD_RES (10)..(11): Any L- or D-natural amino acid and any non-natural amino acid; see  specification as filed for detail ed description of substitutions, R-groups  and preferred embodiments
  MOD_RES (13)..(13): Any L- or D-natural amino acid and any non-natural amino acid; see  specification as filed for detail ed description of substitutions, R-groups  and preferred embodiments
  MOD_RES (15)..(18): Any L- or D-natural or non-natural amino acid, and this range may     encompass 1 or 4 residues; see specification as filed for detailed  description of substitutions, R-groups and preferred emb
  c-term may be amidated

SEQ ID NO: 1265 - protein, 31 aa, Artificial Sequence; identical to SEQ ID NO: 1135
  Description of Artificial Sequence: Synthetic peptide
  MOD_RES (7)..(7): Any L- or D-natural amino acid and any non-natural amino acid; see  specification as filed for detail ed description of substitutions, R-groups  and preferred embodiments
  MOD_RES (10)..(11): Any L- or D-natural amino acid and any non-natural amino acid; see  specification as filed for detail ed description of substitutions, R-groups  and preferred embodiments
  MOD_RES (13)..(13): Any L- or D-natural amino acid and any non-natural amino acid; see  specification as filed for detail ed description of substitutions, R-groups  and preferred embodiments
  MOD_RES (15)..(18): Any L- or D-natural or non-natural amino acid, and this range may     encompass 1 or 4 residues; see specification as filed for detailed  description of substitutions, R-groups and preferred emb
  c-term may be amidated

SEQ ID NO: 1266 - protein, 31 aa, Artificial Sequence; identical to SEQ ID NO: 1136
  Description of Artificial Sequence: Synthetic peptide
  MOD_RES (8)..(8): Any L- or D-natural amino acid and any non-natural amino acid; see  specification as filed for detail ed description of substitutions, R-groups  and preferred embodiments
  MOD_RES (10)..(11): Any L- or D-natural amino acid and any non-natural amino acid; see  specification as filed for detail ed description of substitutions, R-groups  and preferred embodiments
  MOD_RES (13)..(13): Any L- or D-natural amino acid and any non-natural amino acid; see  specification as filed for detail ed description of substitutions, R-groups  and preferred embodiments
  MOD_RES (15)..(18): Any L- or D-natural or non-natural amino acid, and this range may     encompass 1 or 4 residues; see specification as filed for detailed  description of substitutions, R-groups and preferred emb
  c-term may be amidated

SEQ ID NO: 1267 - protein, 31 aa, Artificial Sequence; identical to SEQ ID NO: 1137
  Description of Artificial Sequence: Synthetic peptide
  MOD_RES (9)..(11): Any L- or D-natural amino acid and any non-natural amino acid; see  specification as filed for detail ed description of substitutions, R-groups  and preferred embodiments
  MOD_RES (13)..(13): Any L- or D-natural amino acid and any non-natural amino acid; see  specification as filed for detail ed description of substitutions, R-groups  and preferred embodiments
  MOD_RES (15)..(18): Any L- or D-natural or non-natural amino acid, and this range may     encompass 1 or 4 residues; see specification as filed for detailed  description of substitutions, R-groups and preferred emb
  c-term may be amidated

SEQ ID NO: 1268 - protein, 31 aa, Artificial Sequence; identical to SEQ ID NO: 1138
  Description of Artificial Sequence: Synthetic peptide
  MOD_RES (14)..(14): Any L- or D-natural amino acid and any non-natural amino acid; see  specification as filed for detail ed description of substitutions, R-groups  and preferred embodiments
  MOD_RES (15)..(18): Any L- or D-natural or non-natural amino acid, and this range may     encompass 1 or 4 residues; see specification as filed for detailed  description of substitutions, R-groups and preferred emb
  c-term may be amidated

SEQ ID NO: 1269 - protein, 31 aa, Artificial Sequence; identical to SEQ ID NO: 1139
  Description of Artificial Sequence: Synthetic peptide
  MOD_RES (10)..(11): Any L- or D-natural amino acid and any non-natural amino acid; see  specification as filed for detail ed description of substitutions, R-groups  and preferred embodiments
  MOD_RES (14)..(14): Any L- or D-natural amino acid and any non-natural amino acid; see  specification as filed for detail ed description of substitutions, R-groups  and preferred embodiments
  MOD_RES (15)..(18): Any L- or D-natural or non-natural amino acid, and this range may     encompass 1 or 4 residues; see specification as filed for detailed  description of substitutions, R-groups and preferred emb
  c-term may be amidated

SEQ ID NO: 1270 - protein, 31 aa, Artificial Sequence; identical to SEQ ID NO: 1140
  Description of Artificial Sequence: Synthetic peptide
  MOD_RES (1)..(1): Any L- or D-natural amino acid and any non-natural amino acid; see  specification as filed for detail ed description of substitutions, R-groups  and preferred embodiments
  MOD_RES (10)..(11): Any L- or D-natural amino acid and any non-natural amino acid; see  specification as filed for detail ed description of substitutions, R-groups  and preferred embodiments
  MOD_RES (14)..(14): Any L- or D-natural amino acid and any non-natural amino acid; see  specification as filed for detail ed description of substitutions, R-groups  and preferred embodiments
  MOD_RES (15)..(18): Any L- or D-natural or non-natural amino acid, and this range may     encompass 1 or 4 residues; see specification as filed for detailed  description of substitutions, R-groups and preferred emb
  c-term may be amidated

SEQ ID NO: 1271 - protein, 31 aa, Artificial Sequence; identical to SEQ ID NO: 1141
  Description of Artificial Sequence: Synthetic peptide
  MOD_RES (2)..(2): Any L- or D-natural amino acid and any non-natural amino acid; see  specification as filed for detail ed description of substitutions, R-groups  and preferred embodiments
  MOD_RES (10)..(11): Any L- or D-natural amino acid and any non-natural amino acid; see  specification as filed for detail ed description of substitutions, R-groups  and preferred embodiments
  MOD_RES (14)..(14): Any L- or D-natural amino acid and any non-natural amino acid; see  specification as filed for detail ed description of substitutions, R-groups  and preferred embodiments
  MOD_RES (15)..(18): Any L- or D-natural or non-natural amino acid, and this range may     encompass 1 or 4 residues; see specification as filed for detailed  description of substitutions, R-groups and preferred emb
  c-term may be amidated

SEQ ID NO: 1272 - protein, 31 aa, Artificial Sequence; identical to SEQ ID NO: 1142
  Description of Artificial Sequence: Synthetic peptide
  MOD_RES (3)..(3): Any L- or D-natural amino acid and any non-natural amino acid; see  specification as filed for detail ed description of substitutions, R-groups  and preferred embodiments
  MOD_RES (10)..(11): Any L- or D-natural amino acid and any non-natural amino acid; see  specification as filed for detail ed description of substitutions, R-groups  and preferred embodiments
  MOD_RES (14)..(14): Any L- or D-natural amino acid and any non-natural amino acid; see  specification as filed for detail ed description of substitutions, R-groups  and preferred embodiments
  MOD_RES (15)..(18): Any L- or D-natural or non-natural amino acid, and this range may     encompass 1 or 4 residues; see specification as filed for detailed  description of substitutions, R-groups and preferred emb
  c-term may be amidated

SEQ ID NO: 1273 - protein, 31 aa, Artificial Sequence; identical to SEQ ID NO: 1143
  Description of Artificial Sequence: Synthetic peptide
  MOD_RES (4)..(4): Any L- or D-natural amino acid and any non-natural amino acid; see  specification as filed for detail ed description of substitutions, R-groups  and preferred embodiments
  MOD_RES (10)..(11): Any L- or D-natural amino acid and any non-natural amino acid; see  specification as filed for detail ed description of substitutions, R-groups  and preferred embodiments
  MOD_RES (14)..(14): Any L- or D-natural amino acid and any non-natural amino acid; see  specification as filed for detail ed description of substitutions, R-groups  and preferred embodiments
  MOD_RES (15)..(18): Any L- or D-natural or non-natural amino acid, and this range may     encompass 1 or 4 residues; see specification as filed for detailed  description of substitutions, R-groups and preferred emb
  c-term may be amidated

SEQ ID NO: 1274 - protein, 31 aa, Artificial Sequence; identical to SEQ ID NO: 1144
  Description of Artificial Sequence: Synthetic peptide
  MOD_RES (5)..(5): Any L- or D-natural amino acid and any non-natural amino acid; see  specification as filed for detail ed description of substitutions, R-groups  and preferred embodiments
  MOD_RES (10)..(11): Any L- or D-natural amino acid and any non-natural amino acid; see  specification as filed for detail ed description of substitutions, R-groups  and preferred embodiments
  MOD_RES (14)..(14): Any L- or D-natural amino acid and any non-natural amino acid; see  specification as filed for detail ed description of substitutions, R-groups  and preferred embodiments
  MOD_RES (15)..(18): Any L- or D-natural or non-natural amino acid, and this range may     encompass 1 or 4 residues; see specification as filed for detailed  description of substitutions, R-groups and preferred emb
  c-term may be amidated

SEQ ID NO: 1275 - protein, 31 aa, Artificial Sequence; identical to SEQ ID NO: 1145
  Description of Artificial Sequence: Synthetic peptide
  MOD_RES (6)..(6): Any L- or D-natural amino acid and any non-natural amino acid; see  specification as filed for detail ed description of substitutions, R-groups  and preferred embodiments
  MOD_RES (10)..(11): Any L- or D-natural amino acid and any non-natural amino acid; see  specification as filed for detail ed description of substitutions, R-groups  and preferred embodiments
  MOD_RES (14)..(14): Any L- or D-natural amino acid and any non-natural amino acid; see  specification as filed for detail ed description of substitutions, R-groups  and preferred embodiments
  MOD_RES (15)..(18): Any L- or D-natural or non-natural amino acid, and this range may     encompass 1 or 4 residues; see specification as filed for detailed  description of substitutions, R-groups and preferred emb
  c-term may be amidated

SEQ ID NO: 1276 - protein, 31 aa, Artificial Sequence; identical to SEQ ID NO: 1146
  Description of Artificial Sequence: Synthetic peptide
  MOD_RES (7)..(7): Any L- or D-natural amino acid and any non-natural amino acid; see  specification as filed for detail ed description of substitutions, R-groups  and preferred embodiments
  MOD_RES (10)..(11): Any L- or D-natural amino acid and any non-natural amino acid; see  specification as filed for detail ed description of substitutions, R-groups  and preferred embodiments
  MOD_RES (14)..(14): Any L- or D-natural amino acid and any non-natural amino acid; see  specification as filed for detail ed description of substitutions, R-groups  and preferred embodiments
  MOD_RES (15)..(18): Any L- or D-natural or non-natural amino acid, and this range may     encompass 1 or 4 residues; see specification as filed for detailed  description of substitutions, R-groups and preferred emb
  c-term may be amidated

SEQ ID NO: 1277 - protein, 31 aa, Artificial Sequence; identical to SEQ ID NO: 1147
  Description of Artificial Sequence: Synthetic peptide
  MOD_RES (8)..(8): Any L- or D-natural amino acid and any non-natural amino acid; see  specification as filed for detail ed description of substitutions, R-groups  and preferred embodiments
  MOD_RES (10)..(11): Any L- or D-natural amino acid and any non-natural amino acid; see  specification as filed for detail ed description of substitutions, R-groups  and preferred embodiments
  MOD_RES (14)..(14): Any L- or D-natural amino acid and any non-natural amino acid; see  specification as filed for detail ed description of substitutions, R-groups  and preferred embodiments
  MOD_RES (15)..(18): Any L- or D-natural or non-natural amino acid, and this range may     encompass 1 or 4 residues; see specification as filed for detailed  description of substitutions, R-groups and preferred emb
  c-term may be amidated

SEQ ID NO: 1278 - protein, 31 aa, Artificial Sequence; identical to SEQ ID NO: 1148
  Description of Artificial Sequence: Synthetic peptide
  MOD_RES (9)..(11): Any L- or D-natural amino acid and any non-natural amino acid; see  specification as filed for detail ed description of substitutions, R-groups  and preferred embodiments
  MOD_RES (14)..(14): Any L- or D-natural amino acid and any non-natural amino acid; see  specification as filed for detail ed description of substitutions, R-groups  and preferred embodiments
  MOD_RES (15)..(18): Any L- or D-natural or non-natural amino acid, and this range may     encompass 1 or 4 residues; see specification as filed for detailed  description of substitutions, R-groups and preferred emb
  c-term may be amidated

SEQ ID NO: 1279 - protein, 34 aa, Artificial Sequence; identical to SEQ ID NO: 1149
  Description of Artificial Sequence: Synthetic peptide
  MOD_RES (18)..(21): Any L- or D-natural or non-natural amino acid, and this range may     encompass 1 or 4 residues; see specification as filed for detailed  description of substitutions, R-groups and preferred emb
  c-term may be amidated

SEQ ID NO: 1280 - protein, 34 aa, Artificial Sequence; identical to SEQ ID NO: 1150
  Description of Artificial Sequence: Synthetic peptide
  MOD_RES (10)..(11): Any L- or D-natural amino acid and any non-natural amino acid; see  specification as filed for detail ed description of substitutions, R-groups  and preferred embodiments
  MOD_RES (18)..(21): Any L- or D-natural or non-natural amino acid, and this range may     encompass 1 or 4 residues; see specification as filed for detailed  description of substitutions, R-groups and preferred emb
  c-term may be amidated

SEQ ID NO: 1281 - protein, 34 aa, Artificial Sequence; identical to SEQ ID NO: 1151
  Description of Artificial Sequence: Synthetic peptide
  MOD_RES (1)..(1): Any L- or D-natural amino acid and any non-natural amino acid; see  specification as filed for detail ed description of substitutions, R-groups  and preferred embodiments
  MOD_RES (10)..(11): Any L- or D-natural amino acid and any non-natural amino acid; see  specification as filed for detail ed description of substitutions, R-groups  and preferred embodiments
  MOD_RES (18)..(21): Any L- or D-natural or non-natural amino acid, and this range may     encompass 1 or 4 residues; see specification as filed for detailed  description of substitutions, R-groups and preferred emb
  c-term may be amidated

SEQ ID NO: 1282 - protein, 34 aa, Artificial Sequence; identical to SEQ ID NO: 1152
  Description of Artificial Sequence: Synthetic peptide
  MOD_RES (2)..(2): Any L- or D-natural amino acid and any non-natural amino acid; see  specification as filed for detail ed description of substitutions, R-groups  and preferred embodiments
  MOD_RES (10)..(11): Any L- or D-natural amino acid and any non-natural amino acid; see  specification as filed for detail ed description of substitutions, R-groups  and preferred embodiments
  MOD_RES (18)..(21): Any L- or D-natural or non-natural amino acid, and this range may     encompass 1 or 4 residues; see specification as filed for detailed  description of substitutions, R-groups and preferred emb
  c-term may be amidated

SEQ ID NO: 1283 - protein, 34 aa, Artificial Sequence; identical to SEQ ID NO: 1153
  Description of Artificial Sequence: Synthetic peptide
  MOD_RES (3)..(3): Any L- or D-natural amino acid and any non-natural amino acid; see  specification as filed for detail ed description of substitutions, R-groups  and preferred embodiments
  MOD_RES (10)..(11): Any L- or D-natural amino acid and any non-natural amino acid; see  specification as filed for detail ed description of substitutions, R-groups  and preferred embodiments
  MOD_RES (18)..(21): Any L- or D-natural or non-natural amino acid, and this range may     encompass 1 or 4 residues; see specification as filed for detailed  description of substitutions, R-groups and preferred emb
  c-term may be amidated

SEQ ID NO: 1284 - protein, 34 aa, Artificial Sequence; identical to SEQ ID NO: 1154
  Description of Artificial Sequence: Synthetic peptide
  MOD_RES (4)..(4): Any L- or D-natural amino acid and any non-natural amino acid; see  specification as filed for detail ed description of substitutions, R-groups  and preferred embodiments
  MOD_RES (10)..(11): Any L- or D-natural amino acid and any non-natural amino acid; see  specification as filed for detail ed description of substitutions, R-groups  and preferred embodiments
  MOD_RES (18)..(21): Any L- or D-natural or non-natural amino acid, and this range may     encompass 1 or 4 residues; see specification as filed for detailed  description of substitutions, R-groups and preferred emb
  c-term may be amidated

SEQ ID NO: 1285 - protein, 34 aa, Artificial Sequence; identical to SEQ ID NO: 1155
  Description of Artificial Sequence: Synthetic peptide
  MOD_RES (5)..(5): Any L- or D-natural amino acid and any non-natural amino acid; see  specification as filed for detail ed description of substitutions, R-groups  and preferred embodiments
  MOD_RES (10)..(11): Any L- or D-natural amino acid and any non-natural amino acid; see  specification as filed for detail ed description of substitutions, R-groups  and preferred embodiments
  MOD_RES (18)..(21): Any L- or D-natural or non-natural amino acid, and this range may     encompass 1 or 4 residues; see specification as filed for detailed  description of substitutions, R-groups and preferred emb
  c-term may be amidated

SEQ ID NO: 1286 - protein, 34 aa, Artificial Sequence; identical to SEQ ID NO: 1156
  Description of Artificial Sequence: Synthetic peptide
  MOD_RES (6)..(6): Any L- or D-natural amino acid and any non-natural amino acid; see  specification as filed for detail ed description of substitutions, R-groups  and preferred embodiments
  MOD_RES (10)..(11): Any L- or D-natural amino acid and any non-natural amino acid; see  specification as filed for detail ed description of substitutions, R-groups  and preferred embodiments
  MOD_RES (18)..(21): Any L- or D-natural or non-natural amino acid, and this range may     encompass 1 or 4 residues; see specification as filed for detailed  description of substitutions, R-groups and preferred emb
  c-term may be amidated

SEQ ID NO: 1287 - protein, 34 aa, Artificial Sequence; identical to SEQ ID NO: 1157
  Description of Artificial Sequence: Synthetic peptide
  MOD_RES (7)..(7): Any L- or D-natural amino acid and any non-natural amino acid; see  specification as filed for detail ed description of substitutions, R-groups  and preferred embodiments
  MOD_RES (10)..(11): Any L- or D-natural amino acid and any non-natural amino acid; see  specification as filed for detail ed description of substitutions, R-groups  and preferred embodiments
  MOD_RES (18)..(21): Any L- or D-natural or non-natural amino acid, and this range may     encompass 1 or 4 residues; see specification as filed for detailed  description of substitutions, R-groups and preferred emb
  c-term may be amidated

SEQ ID NO: 1288 - protein, 34 aa, Artificial Sequence; identical to SEQ ID NO: 1158
  Description of Artificial Sequence: Synthetic peptide
  MOD_RES (8)..(8): Any L- or D-natural amino acid and any non-natural amino acid; see  specification as filed for detail ed description of substitutions, R-groups  and preferred embodiments
  MOD_RES (10)..(11): Any L- or D-natural amino acid and any non-natural amino acid; see  specification as filed for detail ed description of substitutions, R-groups  and preferred embodiments
  MOD_RES (18)..(21): Any L- or D-natural or non-natural amino acid, and this range may     encompass 1 or 4 residues; see specification as filed for detailed  description of substitutions, R-groups and preferred emb
  c-term may be amidated

SEQ ID NO: 1289 - protein, 34 aa, Artificial Sequence; identical to SEQ ID NO: 1159
  Description of Artificial Sequence: Synthetic peptide
  MOD_RES (9)..(11): Any L- or D-natural amino acid and any non-natural amino acid; see  specification as filed for detail ed description of substitutions, R-groups  and preferred embodiments
  MOD_RES (18)..(21): Any L- or D-natural or non-natural amino acid, and this range may     encompass 1 or 4 residues; see specification as filed for detailed  description of substitutions, R-groups and preferred emb
  c-term may be amidated

SEQ ID NO: 1290 - protein, 34 aa, Artificial Sequence; identical to SEQ ID NO: 1160
  Description of Artificial Sequence: Synthetic peptide
  MOD_RES (12)..(12): Any L- or D-natural amino acid and any non-natural amino acid; see  specification as filed for detail ed description of substitutions, R-groups  and preferred embodiments
  MOD_RES (18)..(21): Any L- or D-natural or non-natural amino acid, and this range may     encompass 1 or 4 residues; see specification as filed for detailed  description of substitutions, R-groups and preferred emb
  c-term may be amidated

SEQ ID NO: 1291 - protein, 34 aa, Artificial Sequence; identical to SEQ ID NO: 1161
  Description of Artificial Sequence: Synthetic peptide
  MOD_RES (10)..(12): Any L- or D-natural amino acid and any non-natural amino acid; see  specification as filed for detail ed description of substitutions, R-groups  and preferred embodiments
  MOD_RES (18)..(21): Any L- or D-natural or non-natural amino acid, and this range may     encompass 1 or 4 residues; see specification as filed for detailed  description of substitutions, R-groups and preferred emb
  c-term may be amidated

SEQ ID NO: 1292 - protein, 34 aa, Artificial Sequence; identical to SEQ ID NO: 1162
  Description of Artificial Sequence: Synthetic peptide
  MOD_RES (1)..(1): Any L- or D-natural amino acid and any non-natural amino acid; see  specification as filed for detail ed description of substitutions, R-groups  and preferred embodiments
  MOD_RES (10)..(12): Any L- or D-natural amino acid and any non-natural amino acid; see  specification as filed for detail ed description of substitutions, R-groups  and preferred embodiments
  MOD_RES (18)..(21): Any L- or D-natural or non-natural amino acid, and this range may     encompass 1 or 4 residues; see specification as filed for detailed  description of substitutions, R-groups and preferred emb
  c-term may be amidated

SEQ ID NO: 1293 - protein, 34 aa, Artificial Sequence; identical to SEQ ID NO: 1163
  Description of Artificial Sequence: Synthetic peptide
  MOD_RES (2)..(2): Any L- or D-natural amino acid and any non-natural amino acid; see  specification as filed for detail ed description of substitutions, R-groups  and preferred embodiments
  MOD_RES (10)..(12): Any L- or D-natural amino acid and any non-natural amino acid; see  specification as filed for detail ed description of substitutions, R-groups  and preferred embodiments
  MOD_RES (18)..(21): Any L- or D-natural or non-natural amino acid, and this range may     encompass 1 or 4 residues; see specification as filed for detailed  description of substitutions, R-groups and preferred emb
  c-term may be amidated

SEQ ID NO: 1294 - protein, 34 aa, Artificial Sequence; identical to SEQ ID NO: 1164
  Description of Artificial Sequence: Synthetic peptide
  MOD_RES (3)..(3): Any L- or D-natural amino acid and any non-natural amino acid; see  specification as filed for detail ed description of substitutions, R-groups  and preferred embodiments
  MOD_RES (10)..(12): Any L- or D-natural amino acid and any non-natural amino acid; see  specification as filed for detail ed description of substitutions, R-groups  and preferred embodiments
  MOD_RES (18)..(21): Any L- or D-natural or non-natural amino acid, and this range may     encompass 1 or 4 residues; see specification as filed for detailed  description of substitutions, R-groups and preferred emb
  c-term may be amidated

SEQ ID NO: 1295 - protein, 34 aa, Artificial Sequence; identical to SEQ ID NO: 1165
  Description of Artificial Sequence: Synthetic peptide
  MOD_RES (4)..(4): Any L- or D-natural amino acid and any non-natural amino acid; see  specification as filed for detail ed description of substitutions, R-groups  and preferred embodiments
  MOD_RES (10)..(12): Any L- or D-natural amino acid and any non-natural amino acid; see  specification as filed for detail ed description of substitutions, R-groups  and preferred embodiments
  MOD_RES (18)..(21): Any L- or D-natural or non-natural amino acid, and this range may     encompass 1 or 4 residues; see specification as filed for detailed  description of substitutions, R-groups and preferred emb
  c-term may be amidated

SEQ ID NO: 1296 - protein, 34 aa, Artificial Sequence; identical to SEQ ID NO: 1166
  Description of Artificial Sequence: Synthetic peptide
  MOD_RES (5)..(5): Any L- or D-natural amino acid and any non-natural amino acid; see  specification as filed for detail ed description of substitutions, R-groups  and preferred embodiments
  MOD_RES (10)..(12): Any L- or D-natural amino acid and any non-natural amino acid; see  specification as filed for detail ed description of substitutions, R-groups  and preferred embodiments
  MOD_RES (18)..(21): Any L- or D-natural or non-natural amino acid, and this range may     encompass 1 or 4 residues; see specification as filed for detailed  description of substitutions, R-groups and preferred emb
  c-term may be amidated

SEQ ID NO: 1297 - protein, 34 aa, Artificial Sequence; identical to SEQ ID NO: 1167
  Description of Artificial Sequence: Synthetic peptide
  MOD_RES (6)..(6): Any L- or D-natural amino acid and any non-natural amino acid; see  specification as filed for detail ed description of substitutions, R-groups  and preferred embodiments
  MOD_RES (10)..(12): Any L- or D-natural amino acid and any non-natural amino acid; see  specification as filed for detail ed description of substitutions, R-groups  and preferred embodiments
  MOD_RES (18)..(21): Any L- or D-natural or non-natural amino acid, and this range may     encompass 1 or 4 residues; see specification as filed for detailed  description of substitutions, R-groups and preferred emb
  c-term may be amidated

SEQ ID NO: 1298 - protein, 34 aa, Artificial Sequence; identical to SEQ ID NO: 1168
  Description of Artificial Sequence: Synthetic peptide
  MOD_RES (7)..(7): Any L- or D-natural amino acid and any non-natural amino acid; see  specification as filed for detail ed description of substitutions, R-groups  and preferred embodiments
  MOD_RES (10)..(12): Any L- or D-natural amino acid and any non-natural amino acid; see  specification as filed for detail ed description of substitutions, R-groups  and preferred embodiments
  MOD_RES (18)..(21): Any L- or D-natural or non-natural amino acid, and this range may     encompass 1 or 4 residues; see specification as filed for detailed  description of substitutions, R-groups and preferred emb
  c-term may be amidated

SEQ ID NO: 1299 - protein, 34 aa, Artificial Sequence; identical to SEQ ID NO: 1169
  Description of Artificial Sequence: Synthetic peptide
  MOD_RES (8)..(8): Any L- or D-natural amino acid and any non-natural amino acid; see  specification as filed for detail ed description of substitutions, R-groups  and preferred embodiments
  MOD_RES (10)..(12): Any L- or D-natural amino acid and any non-natural amino acid; see  specification as filed for detail ed description of substitutions, R-groups  and preferred embodiments
  MOD_RES (18)..(21): Any L- or D-natural or non-natural amino acid, and this range may     encompass 1 or 4 residues; see specification as filed for detailed  description of substitutions, R-groups and preferred emb
  c-term may be amidated

SEQ ID NO: 1300 - protein, 34 aa, Artificial Sequence; identical to SEQ ID NO: 1170
  Description of Artificial Sequence: Synthetic peptide
  MOD_RES (9)..(12): Any L- or D-natural amino acid and any non-natural amino acid; see  specification as filed for detail ed description of substitutions, R-groups  and preferred embodiments
  MOD_RES (18)..(21): Any L- or D-natural or non-natural amino acid, and this range may     encompass 1 or 4 residues; see specification as filed for detailed  description of substitutions, R-groups and preferred emb
  c-term may be amidated

SEQ ID NO: 1301 - protein, 34 aa, Artificial Sequence; identical to SEQ ID NO: 1171
  Description of Artificial Sequence: Synthetic peptide
  MOD_RES (13)..(13): Any L- or D-natural amino acid and any non-natural amino acid; see  specification as filed for detail ed description of substitutions, R-groups  and preferred embodiments
  MOD_RES (18)..(21): Any L- or D-natural or non-natural amino acid, and this range may     encompass 1 or 4 residues; see specification as filed for detailed  description of substitutions, R-groups and preferred emb
  c-term may be amidated

SEQ ID NO: 1302 - protein, 34 aa, Artificial Sequence; identical to SEQ ID NO: 1172
  Description of Artificial Sequence: Synthetic peptide
  MOD_RES (10)..(11): Any L- or D-natural amino acid and any non-natural amino acid; see  specification as filed for detail ed description of substitutions, R-groups  and preferred embodiments
  MOD_RES (13)..(13): Any L- or D-natural amino acid and any non-natural amino acid; see  specification as filed for detail ed description of substitutions, R-groups  and preferred embodiments
  MOD_RES (18)..(21): Any L- or D-natural or non-natural amino acid, and this range may     encompass 1 or 4 residues; see specification as filed for detailed  description of substitutions, R-groups and preferred emb
  c-term may be amidated

SEQ ID NO: 1303 - protein, 34 aa, Artificial Sequence; identical to SEQ ID NO: 1173
  Description of Artificial Sequence: Synthetic peptide
  MOD_RES (1)..(1): Any L- or D-natural amino acid and any non-natural amino acid; see  specification as filed for detail ed description of substitutions, R-groups  and preferred embodiments
  MOD_RES (10)..(11): Any L- or D-natural amino acid and any non-natural amino acid; see  specification as filed for detail ed description of substitutions, R-groups  and preferred embodiments
  MOD_RES (13)..(13): Any L- or D-natural amino acid and any non-natural amino acid; see  specification as filed for detail ed description of substitutions, R-groups  and preferred embodiments
  MOD_RES (18)..(21): Any L- or D-natural or non-natural amino acid, and this range may     encompass 1 or 4 residues; see specification as filed for detailed  description of substitutions, R-groups and preferred emb
  c-term may be amidated

SEQ ID NO: 1304 - protein, 34 aa, Artificial Sequence; identical to SEQ ID NO: 1174
  Description of Artificial Sequence: Synthetic peptide
  MOD_RES (2)..(2): Any L- or D-natural amino acid and any non-natural amino acid; see  specification as filed for detail ed description of substitutions, R-groups  and preferred embodiments
  MOD_RES (10)..(11): Any L- or D-natural amino acid and any non-natural amino acid; see  specification as filed for detail ed description of substitutions, R-groups  and preferred embodiments
  MOD_RES (13)..(13): Any L- or D-natural amino acid and any non-natural amino acid; see  specification as filed for detail ed description of substitutions, R-groups  and preferred embodiments
  MOD_RES (18)..(21): Any L- or D-natural or non-natural amino acid, and this range may     encompass 1 or 4 residues; see specification as filed for detailed  description of substitutions, R-groups and preferred emb
  c-term may be amidated

SEQ ID NO: 1305 - protein, 34 aa, Artificial Sequence; identical to SEQ ID NO: 1175
  Description of Artificial Sequence: Synthetic peptide
  MOD_RES (3)..(3): Any L- or D-natural amino acid and any non-natural amino acid; see  specification as filed for detail ed description of substitutions, R-groups  and preferred embodiments
  MOD_RES (10)..(11): Any L- or D-natural amino acid and any non-natural amino acid; see  specification as filed for detail ed description of substitutions, R-groups  and preferred embodiments
  MOD_RES (13)..(13): Any L- or D-natural amino acid and any non-natural amino acid; see  specification as filed for detail ed description of substitutions, R-groups  and preferred embodiments
  MOD_RES (18)..(21): Any L- or D-natural or non-natural amino acid, and this range may     encompass 1 or 4 residues; see specification as filed for detailed  description of substitutions, R-groups and preferred emb
  c-term may be amidated

SEQ ID NO: 1306 - protein, 34 aa, Artificial Sequence; identical to SEQ ID NO: 1176
  Description of Artificial Sequence: Synthetic peptide
  MOD_RES (4)..(4): Any L- or D-natural amino acid and any non-natural amino acid; see  specification as filed for detail ed description of substitutions, R-groups  and preferred embodiments
  MOD_RES (10)..(11): Any L- or D-natural amino acid and any non-natural amino acid; see  specification as filed for detail ed description of substitutions, R-groups  and preferred embodiments
  MOD_RES (13)..(13): Any L- or D-natural amino acid and any non-natural amino acid; see  specification as filed for detail ed description of substitutions, R-groups  and preferred embodiments
  MOD_RES (18)..(21): Any L- or D-natural or non-natural amino acid, and this range may     encompass 1 or 4 residues; see specification as filed for detailed  description of substitutions, R-groups and preferred emb
  c-term may be amidated

SEQ ID NO: 1307 - protein, 34 aa, Artificial Sequence; identical to SEQ ID NO: 1177
  Description of Artificial Sequence: Synthetic peptide
  MOD_RES (5)..(5): Any L- or D-natural amino acid and any non-natural amino acid; see  specification as filed for detail ed description of substitutions, R-groups  and preferred embodiments
  MOD_RES (10)..(11): Any L- or D-natural amino acid and any non-natural amino acid; see  specification as filed for detail ed description of substitutions, R-groups  and preferred embodiments
  MOD_RES (13)..(13): Any L- or D-natural amino acid and any non-natural amino acid; see  specification as filed for detail ed description of substitutions, R-groups  and preferred embodiments
  MOD_RES (18)..(21): Any L- or D-natural or non-natural amino acid, and this range may     encompass 1 or 4 residues; see specification as filed for detailed  description of substitutions, R-groups and preferred emb
  c-term may be amidated

SEQ ID NO: 1308 - protein, 34 aa, Artificial Sequence; identical to SEQ ID NO: 1178
  Description of Artificial Sequence: Synthetic peptide
  MOD_RES (6)..(6): Any L- or D-natural amino acid and any non-natural amino acid; see  specification as filed for detail ed description of substitutions, R-groups  and preferred embodiments
  MOD_RES (10)..(11): Any L- or D-natural amino acid and any non-natural amino acid; see  specification as filed for detail ed description of substitutions, R-groups  and preferred embodiments
  MOD_RES (13)..(13): Any L- or D-natural amino acid and any non-natural amino acid; see  specification as filed for detail ed description of substitutions, R-groups  and preferred embodiments
  MOD_RES (18)..(21): Any L- or D-natural or non-natural amino acid, and this range may     encompass 1 or 4 residues; see specification as filed for detailed  description of substitutions, R-groups and preferred emb
  c-term may be amidated

SEQ ID NO: 1309 - protein, 34 aa, Artificial Sequence; identical to SEQ ID NO: 1179
  Description of Artificial Sequence: Synthetic peptide
  MOD_RES (7)..(7): Any L- or D-natural amino acid and any non-natural amino acid; see  specification as filed for detail ed description of substitutions, R-groups  and preferred embodiments
  MOD_RES (10)..(11): Any L- or D-natural amino acid and any non-natural amino acid; see  specification as filed for detail ed description of substitutions, R-groups  and preferred embodiments
  MOD_RES (13)..(13): Any L- or D-natural amino acid and any non-natural amino acid; see  specification as filed for detail ed description of substitutions, R-groups  and preferred embodiments
  MOD_RES (18)..(21): Any L- or D-natural or non-natural amino acid, and this range may     encompass 1 or 4 residues; see specification as filed for detailed  description of substitutions, R-groups and preferred emb
  c-term may be amidated

SEQ ID NO: 1310 - protein, 34 aa, Artificial Sequence; identical to SEQ ID NO: 1180
  Description of Artificial Sequence: Synthetic peptide
  MOD_RES (8)..(8): Any L- or D-natural amino acid and any non-natural amino acid; see  specification as filed for detail ed description of substitutions, R-groups  and preferred embodiments
  MOD_RES (10)..(11): Any L- or D-natural amino acid and any non-natural amino acid; see  specification as filed for detail ed description of substitutions, R-groups  and preferred embodiments
  MOD_RES (13)..(13): Any L- or D-natural amino acid and any non-natural amino acid; see  specification as filed for detail ed description of substitutions, R-groups  and preferred embodiments
  MOD_RES (18)..(21): Any L- or D-natural or non-natural amino acid, and this range may     encompass 1 or 4 residues; see specification as filed for detailed  description of substitutions, R-groups and preferred emb
  c-term may be amidated

SEQ ID NO: 1311 - protein, 34 aa, Artificial Sequence; identical to SEQ ID NO: 1181
  Description of Artificial Sequence: Synthetic peptide
  MOD_RES (9)..(11): Any L- or D-natural amino acid and any non-natural amino acid; see  specification as filed for detail ed description of substitutions, R-groups  and preferred embodiments
  MOD_RES (13)..(13): Any L- or D-natural amino acid and any non-natural amino acid; see  specification as filed for detail ed description of substitutions, R-groups  and preferred embodiments
  MOD_RES (18)..(21): Any L- or D-natural or non-natural amino acid, and this range may     encompass 1 or 4 residues; see specification as filed for detailed  description of substitutions, R-groups and preferred emb
  c-term may be amidated

SEQ ID NO: 1312 - protein, 34 aa, Artificial Sequence; identical to SEQ ID NO: 1182
  Description of Artificial Sequence: Synthetic peptide
  MOD_RES (14)..(14): Any L- or D-natural amino acid and any non-natural amino acid; see  specification as filed for detail ed description of substitutions, R-groups  and preferred embodiments
  MOD_RES (18)..(21): Any L- or D-natural or non-natural amino acid, and this range may     encompass 1 or 4 residues; see specification as filed for detailed  description of substitutions, R-groups and preferred emb
  c-term may be amidated

SEQ ID NO: 1313 - protein, 34 aa, Artificial Sequence; identical to SEQ ID NO: 1183
  Description of Artificial Sequence: Synthetic peptide
  MOD_RES (10)..(11): Any L- or D-natural amino acid and any non-natural amino acid; see  specification as filed for detail ed description of substitutions, R-groups  and preferred embodiments
  MOD_RES (14)..(14): Any L- or D-natural amino acid and any non-natural amino acid; see  specification as filed for detail ed description of substitutions, R-groups  and preferred embodiments
  MOD_RES (18)..(21): Any L- or D-natural or non-natural amino acid, and this range may     encompass 1 or 4 residues; see specification as filed for detailed  description of substitutions, R-groups and preferred emb
  c-term may be amidated

SEQ ID NO: 1314 - protein, 34 aa, Artificial Sequence; identical to SEQ ID NO: 1184
  Description of Artificial Sequence: Synthetic peptide
  MOD_RES (1)..(1): Any L- or D-natural amino acid and any non-natural amino acid; see  specification as filed for detail ed description of substitutions, R-groups  and preferred embodiments
  MOD_RES (10)..(11): Any L- or D-natural amino acid and any non-natural amino acid; see  specification as filed for detail ed description of substitutions, R-groups  and preferred embodiments
  MOD_RES (14)..(14): Any L- or D-natural amino acid and any non-natural amino acid; see  specification as filed for detail ed description of substitutions, R-groups  and preferred embodiments
  MOD_RES (18)..(21): Any L- or D-natural or non-natural amino acid, and this range may     encompass 1 or 4 residues; see specification as filed for detailed  description of substitutions, R-groups and preferred emb
  c-term may be amidated

SEQ ID NO: 1315 - protein, 34 aa, Artificial Sequence; identical to SEQ ID NO: 1185
  Description of Artificial Sequence: Synthetic peptide
  MOD_RES (2)..(2): Any L- or D-natural amino acid and any non-natural amino acid; see  specification as filed for detail ed description of substitutions, R-groups  and preferred embodiments
  MOD_RES (10)..(11): Any L- or D-natural amino acid and any non-natural amino acid; see  specification as filed for detail ed description of substitutions, R-groups  and preferred embodiments
  MOD_RES (14)..(14): Any L- or D-natural amino acid and any non-natural amino acid; see  specification as filed for detail ed description of substitutions, R-groups  and preferred embodiments
  MOD_RES (18)..(21): Any L- or D-natural or non-natural amino acid, and this range may     encompass 1 or 4 residues; see specification as filed for detailed  description of substitutions, R-groups and preferred emb
  c-term may be amidated

SEQ ID NO: 1316 - protein, 34 aa, Artificial Sequence; identical to SEQ ID NO: 1186
  Description of Artificial Sequence: Synthetic peptide
  MOD_RES (3)..(3): Any L- or D-natural amino acid and any non-natural amino acid; see  specification as filed for detail ed description of substitutions, R-groups  and preferred embodiments
  MOD_RES (10)..(11): Any L- or D-natural amino acid and any non-natural amino acid; see  specification as filed for detail ed description of substitutions, R-groups  and preferred embodiments
  MOD_RES (14)..(14): Any L- or D-natural amino acid and any non-natural amino acid; see  specification as filed for detail ed description of substitutions, R-groups  and preferred embodiments
  MOD_RES (18)..(21): Any L- or D-natural or non-natural amino acid, and this range may     encompass 1 or 4 residues; see specification as filed for detailed  description of substitutions, R-groups and preferred emb
  c-term may be amidated

SEQ ID NO: 1317 - protein, 34 aa, Artificial Sequence; identical to SEQ ID NO: 1187
  Description of Artificial Sequence: Synthetic peptide
  MOD_RES (4)..(4): Any L- or D-natural amino acid and any non-natural amino acid; see  specification as filed for detail ed description of substitutions, R-groups  and preferred embodiments
  MOD_RES (10)..(11): Any L- or D-natural amino acid and any non-natural amino acid; see  specification as filed for detail ed description of substitutions, R-groups  and preferred embodiments
  MOD_RES (14)..(14): Any L- or D-natural amino acid and any non-natural amino acid; see  specification as filed for detail ed description of substitutions, R-groups  and preferred embodiments
  MOD_RES (18)..(21): Any L- or D-natural or non-natural amino acid, and this range may     encompass 1 or 4 residues; see specification as filed for detailed  description of substitutions, R-groups and preferred emb
  c-term may be amidated

SEQ ID NO: 1318 - protein, 34 aa, Artificial Sequence; identical to SEQ ID NO: 1188
  Description of Artificial Sequence: Synthetic peptide
  MOD_RES (5)..(5): Any L- or D-natural amino acid and any non-natural amino acid; see  specification as filed for detail ed description of substitutions, R-groups  and preferred embodiments
  MOD_RES (10)..(11): Any L- or D-natural amino acid and any non-natural amino acid; see  specification as filed for detail ed description of substitutions, R-groups  and preferred embodiments
  MOD_RES (14)..(14): Any L- or D-natural amino acid and any non-natural amino acid; see  specification as filed for detail ed description of substitutions, R-groups  and preferred embodiments
  MOD_RES (18)..(21): Any L- or D-natural or non-natural amino acid, and this range may     encompass 1 or 4 residues; see specification as filed for detailed  description of substitutions, R-groups and preferred emb
  c-term may be amidated

SEQ ID NO: 1319 - protein, 34 aa, Artificial Sequence; identical to SEQ ID NO: 1189
  Description of Artificial Sequence: Synthetic peptide
  MOD_RES (6)..(6): Any L- or D-natural amino acid and any non-natural amino acid; see  specification as filed for detail ed description of substitutions, R-groups  and preferred embodiments
  MOD_RES (10)..(11): Any L- or D-natural amino acid and any non-natural amino acid; see  specification as filed for detail ed description of substitutions, R-groups  and preferred embodiments
  MOD_RES (14)..(14): Any L- or D-natural amino acid and any non-natural amino acid; see  specification as filed for detail ed description of substitutions, R-groups  and preferred embodiments
  MOD_RES (18)..(21): Any L- or D-natural or non-natural amino acid, and this range may     encompass 1 or 4 residues; see specification as filed for detailed  description of substitutions, R-groups and preferred emb
  c-term may be amidated

SEQ ID NO: 1320 - protein, 34 aa, Artificial Sequence; identical to SEQ ID NO: 1190
  Description of Artificial Sequence: Synthetic peptide
  MOD_RES (7)..(7): Any L- or D-natural amino acid and any non-natural amino acid; see  specification as filed for detail ed description of substitutions, R-groups  and preferred embodiments
  MOD_RES (10)..(11): Any L- or D-natural amino acid and any non-natural amino acid; see  specification as filed for detail ed description of substitutions, R-groups  and preferred embodiments
  MOD_RES (14)..(14): Any L- or D-natural amino acid and any non-natural amino acid; see  specification as filed for detail ed description of substitutions, R-groups  and preferred embodiments
  MOD_RES (18)..(21): Any L- or D-natural or non-natural amino acid, and this range may     encompass 1 or 4 residues; see specification as filed for detailed  description of substitutions, R-groups and preferred emb
  c-term may be amidated

SEQ ID NO: 1321 - protein, 34 aa, Artificial Sequence; identical to SEQ ID NO: 1191
  Description of Artificial Sequence: Synthetic peptide
  MOD_RES (8)..(8): Any L- or D-natural amino acid and any non-natural amino acid; see  specification as filed for detail ed description of substitutions, R-groups  and preferred embodiments
  MOD_RES (10)..(11): Any L- or D-natural amino acid and any non-natural amino acid; see  specification as filed for detail ed description of substitutions, R-groups  and preferred embodiments
  MOD_RES (14)..(14): Any L- or D-natural amino acid and any non-natural amino acid; see  specification as filed for detail ed description of substitutions, R-groups  and preferred embodiments
  MOD_RES (18)..(21): Any L- or D-natural or non-natural amino acid, and this range may     encompass 1 or 4 residues; see specification as filed for detailed  description of substitutions, R-groups and preferred emb
  c-term may be amidated

SEQ ID NO: 1322 - protein, 34 aa, Artificial Sequence; identical to SEQ ID NO: 1192
  Description of Artificial Sequence: Synthetic peptide
  MOD_RES (9)..(11): Any L- or D-natural amino acid and any non-natural amino acid; see  specification as filed for detail ed description of substitutions, R-groups  and preferred embodiments
  MOD_RES (14)..(14): Any L- or D-natural amino acid and any non-natural amino acid; see  specification as filed for detail ed description of substitutions, R-groups  and preferred embodiments
  MOD_RES (18)..(21): Any L- or D-natural or non-natural amino acid, and this range may     encompass 1 or 4 residues; see specification as filed for detailed  description of substitutions, R-groups and preferred emb
  c-term may be amidated

SEQ ID NO: 1323 - protein, 34 aa, Artificial Sequence; identical to SEQ ID NO: 1193
  Description of Artificial Sequence: Synthetic peptide
  MOD_RES (15)..(15): Any L- or D-natural amino acid and any non-natural amino acid; see  specification as filed for detail ed description of substitutions, R-groups  and preferred embodiments
  MOD_RES (18)..(21): Any L- or D-natural or non-natural amino acid, and this range may     encompass 1 or 4 residues; see specification as filed for detailed  description of substitutions, R-groups and preferred emb
  c-term may be amidated

SEQ ID NO: 1324 - protein, 34 aa, Artificial Sequence; identical to SEQ ID NO: 1194
  Description of Artificial Sequence: Synthetic peptide
  MOD_RES (10)..(11): Any L- or D-natural amino acid and any non-natural amino acid; see  specification as filed for detail ed description of substitutions, R-groups  and preferred embodiments
  MOD_RES (15)..(15): Any L- or D-natural amino acid and any non-natural amino acid; see  specification as filed for detail ed description of substitutions, R-groups  and preferred embodiments
  MOD_RES (18)..(21): Any L- or D-natural or non-natural amino acid, and this range may     encompass 1 or 4 residues; see specification as filed for detailed  description of substitutions, R-groups and preferred emb
  c-term may be amidated

SEQ ID NO: 1325 - protein, 34 aa, Artificial Sequence; identical to SEQ ID NO: 1195
  Description of Artificial Sequence: Synthetic peptide
  MOD_RES (1)..(1): Any L- or D-natural amino acid and any non-natural amino acid; see  specification as filed for detail ed description of substitutions, R-groups  and preferred embodiments
  MOD_RES (10)..(11): Any L- or D-natural amino acid and any non-natural amino acid; see  specification as filed for detail ed description of substitutions, R-groups  and preferred embodiments
  MOD_RES (15)..(15): Any L- or D-natural amino acid and any non-natural amino acid; see  specification as filed for detail ed description of substitutions, R-groups  and preferred embodiments
  MOD_RES (18)..(21): Any L- or D-natural or non-natural amino acid, and this range may     encompass 1 or 4 residues; see specification as filed for detailed  description of substitutions, R-groups and preferred emb
  c-term may be amidated

SEQ ID NO: 1326 - protein, 34 aa, Artificial Sequence; identical to SEQ ID NO: 1196
  Description of Artificial Sequence: Synthetic peptide
  MOD_RES (2)..(2): Any L- or D-natural amino acid and any non-natural amino acid; see  specification as filed for detail ed description of substitutions, R-groups  and preferred embodiments
  MOD_RES (10)..(11): Any L- or D-natural amino acid and any non-natural amino acid; see  specification as filed for detail ed description of substitutions, R-groups  and preferred embodiments
  MOD_RES (15)..(15): Any L- or D-natural amino acid and any non-natural amino acid; see  specification as filed for detail ed description of substitutions, R-groups  and preferred embodiments
  MOD_RES (18)..(21): Any L- or D-natural or non-natural amino acid, and this range may     encompass 1 or 4 residues; see specification as filed for detailed  description of substitutions, R-groups and preferred emb
  c-term may be amidated

SEQ ID NO: 1327 - protein, 34 aa, Artificial Sequence; identical to SEQ ID NO: 1197
  Description of Artificial Sequence: Synthetic peptide
  MOD_RES (3)..(3): Any L- or D-natural amino acid and any non-natural amino acid; see  specification as filed for detail ed description of substitutions, R-groups  and preferred embodiments
  MOD_RES (10)..(11): Any L- or D-natural amino acid and any non-natural amino acid; see  specification as filed for detail ed description of substitutions, R-groups  and preferred embodiments
  MOD_RES (15)..(15): Any L- or D-natural amino acid and any non-natural amino acid; see  specification as filed for detail ed description of substitutions, R-groups  and preferred embodiments
  MOD_RES (18)..(21): Any L- or D-natural or non-natural amino acid, and this range may     encompass 1 or 4 residues; see specification as filed for detailed  description of substitutions, R-groups and preferred emb
  c-term may be amidated

SEQ ID NO: 1328 - protein, 34 aa, Artificial Sequence; identical to SEQ ID NO: 1198
  Description of Artificial Sequence: Synthetic peptide
  MOD_RES (4)..(4): Any L- or D-natural amino acid and any non-natural amino acid; see  specification as filed for detail ed description of substitutions, R-groups  and preferred embodiments
  MOD_RES (10)..(11): Any L- or D-natural amino acid and any non-natural amino acid; see  specification as filed for detail ed description of substitutions, R-groups  and preferred embodiments
  MOD_RES (15)..(15): Any L- or D-natural amino acid and any non-natural amino acid; see  specification as filed for detail ed description of substitutions, R-groups  and preferred embodiments
  MOD_RES (18)..(21): Any L- or D-natural or non-natural amino acid, and this range may     encompass 1 or 4 residues; see specification as filed for detailed  description of substitutions, R-groups and preferred emb
  c-term may be amidated

SEQ ID NO: 1329 - protein, 34 aa, Artificial Sequence; identical to SEQ ID NO: 1199
  Description of Artificial Sequence: Synthetic peptide
  MOD_RES (5)..(5): Any L- or D-natural amino acid and any non-natural amino acid; see  specification as filed for detail ed description of substitutions, R-groups  and preferred embodiments
  MOD_RES (10)..(11): Any L- or D-natural amino acid and any non-natural amino acid; see  specification as filed for detail ed description of substitutions, R-groups  and preferred embodiments
  MOD_RES (15)..(15): Any L- or D-natural amino acid and any non-natural amino acid; see  specification as filed for detail ed description of substitutions, R-groups  and preferred embodiments
  MOD_RES (18)..(21): Any L- or D-natural or non-natural amino acid, and this range may     encompass 1 or 4 residues; see specification as filed for detailed  description of substitutions, R-groups and preferred emb
  c-term may be amidated

SEQ ID NO: 1330 - protein, 34 aa, Artificial Sequence; identical to SEQ ID NO: 1200
  Description of Artificial Sequence: Synthetic peptide
  MOD_RES (6)..(6): Any L- or D-natural amino acid and any non-natural amino acid; see  specification as filed for detail ed description of substitutions, R-groups  and preferred embodiments
  MOD_RES (10)..(11): Any L- or D-natural amino acid and any non-natural amino acid; see  specification as filed for detail ed description of substitutions, R-groups  and preferred embodiments
  MOD_RES (15)..(15): Any L- or D-natural amino acid and any non-natural amino acid; see  specification as filed for detail ed description of substitutions, R-groups  and preferred embodiments
  MOD_RES (18)..(21): Any L- or D-natural or non-natural amino acid, and this range may     encompass 1 or 4 residues; see specification as filed for detailed  description of substitutions, R-groups and preferred emb
  c-term may be amidated

SEQ ID NO: 1331 - protein, 34 aa, Artificial Sequence; identical to SEQ ID NO: 1201
  Description of Artificial Sequence: Synthetic peptide
  MOD_RES (7)..(7): Any L- or D-natural amino acid and any non-natural amino acid; see  specification as filed for detail ed description of substitutions, R-groups  and preferred embodiments
  MOD_RES (10)..(11): Any L- or D-natural amino acid and any non-natural amino acid; see  specification as filed for detail ed description of substitutions, R-groups  and preferred embodiments
  MOD_RES (15)..(15): Any L- or D-natural amino acid and any non-natural amino acid; see  specification as filed for detail ed description of substitutions, R-groups  and preferred embodiments
  MOD_RES (18)..(21): Any L- or D-natural or non-natural amino acid, and this range may     encompass 1 or 4 residues; see specification as filed for detailed  description of substitutions, R-groups and preferred emb
  c-term may be amidated

SEQ ID NO: 1332 - protein, 34 aa, Artificial Sequence; identical to SEQ ID NO: 1202
  Description of Artificial Sequence: Synthetic peptide
  MOD_RES (8)..(8): Any L- or D-natural amino acid and any non-natural amino acid; see  specification as filed for detail ed description of substitutions, R-groups  and preferred embodiments
  MOD_RES (10)..(11): Any L- or D-natural amino acid and any non-natural amino acid; see  specification as filed for detail ed description of substitutions, R-groups  and preferred embodiments
  MOD_RES (15)..(15): Any L- or D-natural amino acid and any non-natural amino acid; see  specification as filed for detail ed description of substitutions, R-groups  and preferred embodiments
  MOD_RES (18)..(21): Any L- or D-natural or non-natural amino acid, and this range may     encompass 1 or 4 residues; see specification as filed for detailed  description of substitutions, R-groups and preferred emb
  c-term may be amidated

SEQ ID NO: 1333 - protein, 34 aa, Artificial Sequence; identical to SEQ ID NO: 1203
  Description of Artificial Sequence: Synthetic peptide
  MOD_RES (9)..(11): Any L- or D-natural amino acid and any non-natural amino acid; see  specification as filed for detail ed description of substitutions, R-groups  and preferred embodiments
  MOD_RES (15)..(15): Any L- or D-natural amino acid and any non-natural amino acid; see  specification as filed for detail ed description of substitutions, R-groups  and preferred embodiments
  MOD_RES (18)..(21): Any L- or D-natural or non-natural amino acid, and this range may     encompass 1 or 4 residues; see specification as filed for detailed  description of substitutions, R-groups and preferred emb
  c-term may be amidated

SEQ ID NO: 1334 - protein, 34 aa, Artificial Sequence; identical to SEQ ID NO: 1204
  Description of Artificial Sequence: Synthetic peptide
  MOD_RES (16)..(16): Any L- or D-natural amino acid and any non-natural amino acid; see  specification as filed for detail ed description of substitutions, R-groups  and preferred embodiments
  MOD_RES (18)..(21): Any L- or D-natural or non-natural amino acid, and this range may     encompass 1 or 4 residues; see specification as filed for detailed  description of substitutions, R-groups and preferred emb
  c-term may be amidated

SEQ ID NO: 1335 - protein, 34 aa, Artificial Sequence; identical to SEQ ID NO: 1205
  Description of Artificial Sequence: Synthetic peptide
  MOD_RES (10)..(11): Any L- or D-natural amino acid and any non-natural amino acid; see  specification as filed for detail ed description of substitutions, R-groups  and preferred embodiments
  MOD_RES (16)..(16): Any L- or D-natural amino acid and any non-natural amino acid; see  specification as filed for detail ed description of substitutions, R-groups  and preferred embodiments
  MOD_RES (18)..(21): Any L- or D-natural or non-natural amino acid, and this range may     encompass 1 or 4 residues; see specification as filed for detailed  description of substitutions, R-groups and preferred emb
  c-term may be amidated

SEQ ID NO: 1336 - protein, 34 aa, Artificial Sequence; identical to SEQ ID NO: 1206
  Description of Artificial Sequence: Synthetic peptide
  MOD_RES (1)..(1): Any L- or D-natural amino acid and any non-natural amino acid; see  specification as filed for detail ed description of substitutions, R-groups  and preferred embodiments
  MOD_RES (10)..(11): Any L- or D-natural amino acid and any non-natural amino acid; see  specification as filed for detail ed description of substitutions, R-groups  and preferred embodiments
  MOD_RES (16)..(16): Any L- or D-natural amino acid and any non-natural amino acid; see  specification as filed for detail ed description of substitutions, R-groups  and preferred embodiments
  MOD_RES (18)..(21): Any L- or D-natural or non-natural amino acid, and this range may     encompass 1 or 4 residues; see specification as filed for detailed  description of substitutions, R-groups and preferred emb
  c-term may be amidated

SEQ ID NO: 1337 - protein, 34 aa, Artificial Sequence; identical to SEQ ID NO: 1207
  Description of Artificial Sequence: Synthetic peptide
  MOD_RES (2)..(2): Any L- or D-natural amino acid and any non-natural amino acid; see  specification as filed for detail ed description of substitutions, R-groups  and preferred embodiments
  MOD_RES (10)..(11): Any L- or D-natural amino acid and any non-natural amino acid; see  specification as filed for detail ed description of substitutions, R-groups  and preferred embodiments
  MOD_RES (16)..(16): Any L- or D-natural amino acid and any non-natural amino acid; see  specification as filed for detail ed description of substitutions, R-groups  and preferred embodiments
  MOD_RES (18)..(21): Any L- or D-natural or non-natural amino acid, and this range may     encompass 1 or 4 residues; see specification as filed for detailed  description of substitutions, R-groups and preferred emb
  c-term may be amidated

SEQ ID NO: 1338 - protein, 34 aa, Artificial Sequence; identical to SEQ ID NO: 1208
  Description of Artificial Sequence: Synthetic peptide
  MOD_RES (3)..(3): Any L- or D-natural amino acid and any non-natural amino acid; see  specification as filed for detail ed description of substitutions, R-groups  and preferred embodiments
  MOD_RES (10)..(11): Any L- or D-natural amino acid and any non-natural amino acid; see  specification as filed for detail ed description of substitutions, R-groups  and preferred embodiments
  MOD_RES (16)..(16): Any L- or D-natural amino acid and any non-natural amino acid; see  specification as filed for detail ed description of substitutions, R-groups  and preferred embodiments
  MOD_RES (18)..(21): Any L- or D-natural or non-natural amino acid, and this range may     encompass 1 or 4 residues; see specification as filed for detailed  description of substitutions, R-groups and preferred emb
  c-term may be amidated

SEQ ID NO: 1339 - protein, 34 aa, Artificial Sequence; identical to SEQ ID NO: 1209
  Description of Artificial Sequence: Synthetic peptide
  MOD_RES (4)..(4): Any L- or D-natural amino acid and any non-natural amino acid; see  specification as filed for detail ed description of substitutions, R-groups  and preferred embodiments
  MOD_RES (10)..(11): Any L- or D-natural amino acid and any non-natural amino acid; see  specification as filed for detail ed description of substitutions, R-groups  and preferred embodiments
  MOD_RES (16)..(16): Any L- or D-natural amino acid and any non-natural amino acid; see  specification as filed for detail ed description of substitutions, R-groups  and preferred embodiments
  MOD_RES (18)..(21): Any L- or D-natural or non-natural amino acid, and this range may     encompass 1 or 4 residues; see specification as filed for detailed  description of substitutions, R-groups and preferred emb
  c-term may be amidated

SEQ ID NO: 1340 - protein, 34 aa, Artificial Sequence; identical to SEQ ID NO: 1210
  Description of Artificial Sequence: Synthetic peptide
  MOD_RES (17)..(17): Any L- or D-natural amino acid and any non-natural amino acid; see  specification as filed for detail ed description of substitutions, R-groups  and preferred embodiments
  MOD_RES (18)..(21): Any L- or D-natural or non-natural amino acid, and this range may     encompass 1 or 4 residues; see specification as filed for detailed  description of substitutions, R-groups and preferred emb
  c-term may be amidated

SEQ ID NO: 1341 - protein, 34 aa, Artificial Sequence; identical to SEQ ID NO: 1211
  Description of Artificial Sequence: Synthetic peptide
  MOD_RES (10)..(11): Any L- or D-natural amino acid and any non-natural amino acid; see  specification as filed for detail ed description of substitutions, R-groups  and preferred embodiments
  MOD_RES (17)..(17): Any L- or D-natural amino acid and any non-natural amino acid; see  specification as filed for detail ed description of substitutions, R-groups  and preferred embodiments
  MOD_RES (18)..(21): Any L- or D-natural or non-natural amino acid, and this range may     encompass 1 or 4 residues; see specification as filed for detailed  description of substitutions, R-groups and preferred emb
  c-term may be amidated

SEQ ID NO: 1342 - protein, 34 aa, Artificial Sequence; identical to SEQ ID NO: 1212
  Description of Artificial Sequence: Synthetic peptide
  MOD_RES (1)..(1): Any L- or D-natural amino acid and any non-natural amino acid; see  specification as filed for detail ed description of substitutions, R-groups  and preferred embodiments
  MOD_RES (10)..(11): Any L- or D-natural amino acid and any non-natural amino acid; see  specification as filed for detail ed description of substitutions, R-groups  and preferred embodiments
  MOD_RES (17)..(17): Any L- or D-natural amino acid and any non-natural amino acid; see  specification as filed for detail ed description of substitutions, R-groups  and preferred embodiments
  MOD_RES (18)..(21): Any L- or D-natural or non-natural amino acid, and this range may     encompass 1 or 4 residues; see specification as filed for detailed  description of substitutions, R-groups and preferred emb
  c-term may be amidated

SEQ ID NO: 1343 - protein, 34 aa, Artificial Sequence; identical to SEQ ID NO: 1213
  Description of Artificial Sequence: Synthetic peptide
  MOD_RES (2)..(2): Any L- or D-natural amino acid and any non-natural amino acid; see  specification as filed for detail ed description of substitutions, R-groups  and preferred embodiments
  MOD_RES (10)..(11): Any L- or D-natural amino acid and any non-natural amino acid; see  specification as filed for detail ed description of substitutions, R-groups  and preferred embodiments
  MOD_RES (17)..(17): Any L- or D-natural amino acid and any non-natural amino acid; see  specification as filed for detail ed description of substitutions, R-groups  and preferred embodiments
  MOD_RES (18)..(21): Any L- or D-natural or non-natural amino acid, and this range may     encompass 1 or 4 residues; see specification as filed for detailed  description of substitutions, R-groups and preferred emb
  c-term may be amidated

SEQ ID NO: 1344 - protein, 34 aa, Artificial Sequence; identical to SEQ ID NO: 1214
  Description of Artificial Sequence: Synthetic peptide
  MOD_RES (3)..(3): Any L- or D-natural amino acid and any non-natural amino acid; see  specification as filed for detail ed description of substitutions, R-groups  and preferred embodiments
  MOD_RES (10)..(11): Any L- or D-natural amino acid and any non-natural amino acid; see  specification as filed for detail ed description of substitutions, R-groups  and preferred embodiments
  MOD_RES (17)..(17): Any L- or D-natural amino acid and any non-natural amino acid; see  specification as filed for detail ed description of substitutions, R-groups  and preferred embodiments
  MOD_RES (18)..(21): Any L- or D-natural or non-natural amino acid, and this range may     encompass 1 or 4 residues; see specification as filed for detailed  description of substitutions, R-groups and preferred emb
  c-term may be amidated

SEQ ID NO: 1345 - protein, 34 aa, Artificial Sequence; identical to SEQ ID NO: 1215
  Description of Artificial Sequence: Synthetic peptide
  MOD_RES (4)..(4): Any L- or D-natural amino acid and any non-natural amino acid; see  specification as filed for detail ed description of substitutions, R-groups  and preferred embodiments
  MOD_RES (10)..(11): Any L- or D-natural amino acid and any non-natural amino acid; see  specification as filed for detail ed description of substitutions, R-groups  and preferred embodiments
  MOD_RES (17)..(17): Any L- or D-natural amino acid and any non-natural amino acid; see  specification as filed for detail ed description of substitutions, R-groups  and preferred embodiments
  MOD_RES (18)..(21): Any L- or D-natural or non-natural amino acid, and this range may     encompass 1 or 4 residues; see specification as filed for detailed  description of substitutions, R-groups and preferred emb
  c-term may be amidated

SEQ ID NO: 1346 - protein, 34 aa, Artificial Sequence; identical to SEQ ID NO: 1216
  Description of Artificial Sequence: Synthetic peptide
  MOD_RES (5)..(5): Any L- or D-natural amino acid and any non-natural amino acid; see  specification as filed for detail ed description of substitutions, R-groups  and preferred embodiments
  MOD_RES (10)..(11): Any L- or D-natural amino acid and any non-natural amino acid; see  specification as filed for detail ed description of substitutions, R-groups  and preferred embodiments
  MOD_RES (17)..(17): Any L- or D-natural amino acid and any non-natural amino acid; see  specification as filed for detail ed description of substitutions, R-groups  and preferred embodiments
  MOD_RES (18)..(21): Any L- or D-natural or non-natural amino acid, and this range may     encompass 1 or 4 residues; see specification as filed for detailed  description of substitutions, R-groups and preferred emb
  c-term may be amidated

SEQ ID NO: 1347 - protein, 34 aa, Artificial Sequence; identical to SEQ ID NO: 1217
  Description of Artificial Sequence: Synthetic peptide
  MOD_RES (6)..(6): Any L- or D-natural amino acid and any non-natural amino acid; see  specification as filed for detail ed description of substitutions, R-groups  and preferred embodiments
  MOD_RES (10)..(11): Any L- or D-natural amino acid and any non-natural amino acid; see  specification as filed for detail ed description of substitutions, R-groups  and preferred embodiments
  MOD_RES (17)..(17): Any L- or D-natural amino acid and any non-natural amino acid; see  specification as filed for detail ed description of substitutions, R-groups  and preferred embodiments
  MOD_RES (18)..(21): Any L- or D-natural or non-natural amino acid, and this range may     encompass 1 or 4 residues; see specification as filed for detailed  description of substitutions, R-groups and preferred emb
  c-term may be amidated

SEQ ID NO: 1348 - protein, 34 aa, Artificial Sequence; identical to SEQ ID NO: 1218
  Description of Artificial Sequence: Synthetic peptide
  MOD_RES (7)..(7): Any L- or D-natural amino acid and any non-natural amino acid; see  specification as filed for detail ed description of substitutions, R-groups  and preferred embodiments
  MOD_RES (10)..(11): Any L- or D-natural amino acid and any non-natural amino acid; see  specification as filed for detail ed description of substitutions, R-groups  and preferred embodiments
  MOD_RES (17)..(17): Any L- or D-natural amino acid and any non-natural amino acid; see  specification as filed for detail ed description of substitutions, R-groups  and preferred embodiments
  MOD_RES (18)..(21): Any L- or D-natural or non-natural amino acid, and this range may     encompass 1 or 4 residues; see specification as filed for detailed  description of substitutions, R-groups and preferred emb
  c-term may be amidated

SEQ ID NO: 1349 - protein, 34 aa, Artificial Sequence; identical to SEQ ID NO: 1219
  Description of Artificial Sequence: Synthetic peptide
  MOD_RES (8)..(8): Any L- or D-natural amino acid and any non-natural amino acid; see  specification as filed for detail ed description of substitutions, R-groups  and preferred embodiments
  MOD_RES (10)..(11): Any L- or D-natural amino acid and any non-natural amino acid; see  specification as filed for detail ed description of substitutions, R-groups  and preferred embodiments
  MOD_RES (17)..(17): Any L- or D-natural amino acid and any non-natural amino acid; see  specification as filed for detail ed description of substitutions, R-groups  and preferred embodiments
  MOD_RES (18)..(21): Any L- or D-natural or non-natural amino acid, and this range may     encompass 1 or 4 residues; see specification as filed for detailed  description of substitutions, R-groups and preferred emb
  c-term may be amidated

SEQ ID NO: 1350 - protein, 34 aa, Artificial Sequence; identical to SEQ ID NO: 1220
  Description of Artificial Sequence: Synthetic peptide
  MOD_RES (9)..(11): Any L- or D-natural amino acid and any non-natural amino acid; see  specification as filed for detail ed description of substitutions, R-groups  and preferred embodiments
  MOD_RES (17)..(17): Any L- or D-natural amino acid and any non-natural amino acid; see  specification as filed for detail ed description of substitutions, R-groups  and preferred embodiments
  MOD_RES (18)..(21): Any L- or D-natural or non-natural amino acid, and this range may     encompass 1 or 4 residues; see specification as filed for detailed  description of substitutions, R-groups and preferred emb
  c-term may be amidated

SEQ ID NO: 1351 - protein, 35 aa, Artificial Sequence
  Description of Artificial Sequence: Synthetic peptide
  c-term may be amidated
QPDAINAPVTCCYNFTNRKISVQRLASYRRITSSK

SEQ ID NO: 1352 - protein, 35 aa, Artificial Sequence
  Description of Artificial Sequence: Synthetic peptide
  MOD_RES (11)..(12): Any L- or D-natural amino acid and any non-natural amino acid; see  specification as filed for detail ed description of substitutions, R-groups  and preferred embodiments
  c-term may be amidated
QPDAINAPVTXXYNFTNRKISVQRLASYRRITSSK

SEQ ID NO: 1353 - protein, 35 aa, Artificial Sequence
  Description of Artificial Sequence: Synthetic peptide
  MOD_RES (1)..(1): Any L- or D-natural amino acid and any non-natural amino acid; see  specification as filed for detail ed description of substitutions, R-groups  and preferred embodiments
  MOD_RES (11)..(12): Any L- or D-natural amino acid and any non-natural amino acid; see  specification as filed for detail ed description of substitutions, R-groups  and preferred embodiments
  c-term may be amidated
XPDAINAPVTXXYNFTNRKISVQRLASYRRITSSK

SEQ ID NO: 1354 - protein, 35 aa, Artificial Sequence
  Description of Artificial Sequence: Synthetic peptide
  MOD_RES (2)..(2): Any L- or D-natural amino acid and any non-natural amino acid; see  specification as filed for detail ed description of substitutions, R-groups  and preferred embodiments
  MOD_RES (11)..(12): Any L- or D-natural amino acid and any non-natural amino acid; see  specification as filed for detail ed description of substitutions, R-groups  and preferred embodiments
  c-term may be amidated
QXDAINAPVTXXYNFTNRKISVQRLASYRRITSSK

SEQ ID NO: 1355 - protein, 35 aa, Artificial Sequence
  Description of Artificial Sequence: Synthetic peptide
  MOD_RES (3)..(3): Any L- or D-natural amino acid and any non-natural amino acid; see  specification as filed for detail ed description of substitutions, R-groups  and preferred embodiments
  MOD_RES (11)..(12): Any L- or D-natural amino acid and any non-natural amino acid; see  specification as filed for detail ed description of substitutions, R-groups  and preferred embodiments
  c-term may be amidated
QPXAINAPVTXXYNFTNRKISVQRLASYRRITSSK

SEQ ID NO: 1356 - protein, 35 aa, Artificial Sequence
  Description of Artificial Sequence: Synthetic peptide
  MOD_RES (4)..(4): Any L- or D-natural amino acid and any non-natural amino acid; see  specification as filed for detail ed description of substitutions, R-groups  and preferred embodiments
  MOD_RES (11)..(12): Any L- or D-natural amino acid and any non-natural amino acid; see  specification as filed for detail ed description of substitutions, R-groups  and preferred embodiments
  c-term may be amidated
QPDXINAPVTXXYNFTNRKISVQRLASYRRITSSK

SEQ ID NO: 1357 - protein, 35 aa, Artificial Sequence
  Description of Artificial Sequence: Synthetic peptide
  MOD_RES (5)..(5): Any L- or D-natural amino acid and any non-natural amino acid; see  specification as filed for detail ed description of substitutions, R-groups  and preferred embodiments
  MOD_RES (11)..(12): Any L- or D-natural amino acid and any non-natural amino acid; see  specification as filed for detail ed description of substitutions, R-groups  and preferred embodiments
  c-term may be amidated
QPDAXNAPVTXXYNFTNRKISVQRLASYRRITSSK

SEQ ID NO: 1358 - protein, 35 aa, Artificial Sequence
  Description of Artificial Sequence: Synthetic peptide
  MOD_RES (6)..(6): Any L- or D-natural amino acid and any non-natural amino acid; see  specification as filed for detail ed description of substitutions, R-groups  and preferred embodiments
  MOD_RES (11)..(12): Any L- or D-natural amino acid and any non-natural amino acid; see  specification as filed for detail ed description of substitutions, R-groups  and preferred embodiments
  c-term may be amidated
QPDAIXAPVTXXYNFTNRKISVQRLASYRRITSSK

SEQ ID NO: 1359 - protein, 35 aa, Artificial Sequence
  Description of Artificial Sequence: Synthetic peptide
  MOD_RES (7)..(7): Any L- or D-natural amino acid and any non-natural amino acid; see  specification as filed for detail ed description of substitutions, R-groups  and preferred embodiments
  MOD_RES (11)..(12): Any L- or D-natural amino acid and any non-natural amino acid; see  specification as filed for detail ed description of substitutions, R-groups  and preferred embodiments
  c-term may be amidated
QPDAINXPVTXXYNFTNRKISVQRLASYRRITSSK

SEQ ID NO: 1360 - protein, 35 aa, Artificial Sequence
  Description of Artificial Sequence: Synthetic peptide
  MOD_RES (8)..(8): Any L- or D-natural amino acid and any non-natural amino acid; see  specification as filed for detail ed description of substitutions, R-groups  and preferred embodiments
  MOD_RES (11)..(12): Any L- or D-natural amino acid and any non-natural amino acid; see  specification as filed for detail ed description of substitutions, R-groups  and preferred embodiments
  c-term may be amidated
QPDAINAXVTXXYNFTNRKISVQRLASYRRITSSK

SEQ ID NO: 1361 - protein, 35 aa, Artificial Sequence
  Description of Artificial Sequence: Synthetic peptide
  MOD_RES (9)..(9): Any L- or D-natural amino acid and any non-natural amino acid; see  specification as filed for detail ed description of substitutions, R-groups  and preferred embodiments
  MOD_RES (11)..(12): Any L- or D-natural amino acid and any non-natural amino acid; see  specification as filed for detail ed description of substitutions, R-groups  and preferred embodiments
  c-term may be amidated
QPDAINAPXTXXYNFTNRKISVQRLASYRRITSSK

SEQ ID NO: 1362 - protein, 35 aa, Artificial Sequence
  Description of Artificial Sequence: Synthetic peptide
  MOD_RES (10)..(12): Any L- or D-natural amino acid and any non-natural amino acid; see  specification as filed for detail ed description of substitutions, R-groups  and preferred embodiments
  c-term may be amidated
QPDAINAPVXXXYNFTNRKISVQRLASYRRITSSK

SEQ ID NO: 1363 - protein, 35 aa, Artificial Sequence
  Description of Artificial Sequence: Synthetic peptide
  c-term may be amidated
QPDAINAPVTCCENFTNRKISVQRLASYRRITSSK

SEQ ID NO: 1364 - protein, 35 aa, Artificial Sequence
  Description of Artificial Sequence: Synthetic peptide
  MOD_RES (11)..(12): Any L- or D-natural amino acid and any non-natural amino acid; see  specification as filed for detail ed description of substitutions, R-groups  and preferred embodiments
  c-term may be amidated
QPDAINAPVTXXENFTNRKISVQRLASYRRITSSK

SEQ ID NO: 1365 - protein, 35 aa, Artificial Sequence
  Description of Artificial Sequence: Synthetic peptide
  MOD_RES (1)..(1): Any L- or D-natural amino acid and any non-natural amino acid; see  specification as filed for detail ed description of substitutions, R-groups  and preferred embodiments
  MOD_RES (11)..(12): Any L- or D-natural amino acid and any non-natural amino acid; see  specification as filed for detail ed description of substitutions, R-groups  and preferred embodiments
  c-term may be amidated
XPDAINAPVTXXENFTNRKISVQRLASYRRITSSK

SEQ ID NO: 1366 - protein, 35 aa, Artificial Sequence
  Description of Artificial Sequence: Synthetic peptide
  MOD_RES (2)..(2): Any L- or D-natural amino acid and any non-natural amino acid; see  specification as filed for detail ed description of substitutions, R-groups  and preferred embodiments
  MOD_RES (11)..(12): Any L- or D-natural amino acid and any non-natural amino acid; see  specification as filed for detail ed description of substitutions, R-groups  and preferred embodiments
  c-term may be amidated
QXDAINAPVTXXENFTNRKISVQRLASYRRITSSK

SEQ ID NO: 1367 - protein, 35 aa, Artificial Sequence
  Description of Artificial Sequence: Synthetic peptide
  MOD_RES (3)..(3): Any L- or D-natural amino acid and any non-natural amino acid; see  specification as filed for detail ed description of substitutions, R-groups  and preferred embodiments
  MOD_RES (11)..(12): Any L- or D-natural amino acid and any non-natural amino acid; see  specification as filed for detail ed description of substitutions, R-groups  and preferred embodiments
  c-term may be amidated
QPXAINAPVTXXENFTNRKISVQRLASYRRITSSK

SEQ ID NO: 1368 - protein, 35 aa, Artificial Sequence
  Description of Artificial Sequence: Synthetic peptide
  MOD_RES (4)..(4): Any L- or D-natural amino acid and any non-natural amino acid; see  specification as filed for detail ed description of substitutions, R-groups  and preferred embodiments
  MOD_RES (11)..(12): Any L- or D-natural amino acid and any non-natural amino acid; see  specification as filed for detail ed description of substitutions, R-groups  and preferred embodiments
  c-term may be amidated
QPDXINAPVTXXENFTNRKISVQRLASYRRITSSK

SEQ ID NO: 1369 - protein, 35 aa, Artificial Sequence
  Description of Artificial Sequence: Synthetic peptide
  MOD_RES (5)..(5): Any L- or D-natural amino acid and any non-natural amino acid; see  specification as filed for detail ed description of substitutions, R-groups  and preferred embodiments
  MOD_RES (11)..(12): Any L- or D-natural amino acid and any non-natural amino acid; see  specification as filed for detail ed description of substitutions, R-groups  and preferred embodiments
  c-term may be amidated
QPDAXNAPVTXXENFTNRKISVQRLASYRRITSSK

SEQ ID NO: 1370 - protein, 35 aa, Artificial Sequence
  Description of Artificial Sequence: Synthetic peptide
  MOD_RES (6)..(6): Any L- or D-natural amino acid and any non-natural amino acid; see  specification as filed for detail ed description of substitutions, R-groups  and preferred embodiments
  MOD_RES (11)..(12): Any L- or D-natural amino acid and any non-natural amino acid; see  specification as filed for detail ed description of substitutions, R-groups  and preferred embodiments
  c-term may be amidated
QPDAIXAPVTXXENFTNRKISVQRLASYRRITSSK

SEQ ID NO: 1371 - protein, 35 aa, Artificial Sequence
  Description of Artificial Sequence: Synthetic peptide
  MOD_RES (7)..(7): Any L- or D-natural amino acid and any non-natural amino acid; see  specification as filed for detail ed description of substitutions, R-groups  and preferred embodiments
  MOD_RES (11)..(12): Any L- or D-natural amino acid and any non-natural amino acid; see  specification as filed for detail ed description of substitutions, R-groups  and preferred embodiments
  c-term may be amidated
QPDAINXPVTXXENFTNRKISVQRLASYRRITSSK

SEQ ID NO: 1372 - protein, 35 aa, Artificial Sequence
  Description of Artificial Sequence: Synthetic peptide
  MOD_RES (8)..(8): Any L- or D-natural amino acid and any non-natural amino acid; see  specification as filed for detail ed description of substitutions, R-groups  and preferred embodiments
  MOD_RES (11)..(12): Any L- or D-natural amino acid and any non-natural amino acid; see  specification as filed for detail ed description of substitutions, R-groups  and preferred embodiments
  c-term may be amidated
QPDAINAXVTXXENFTNRKISVQRLASYRRITSSK

SEQ ID NO: 1373 - protein, 35 aa, Artificial Sequence
  Description of Artificial Sequence: Synthetic peptide
  MOD_RES (9)..(9): Any L- or D-natural amino acid and any non-natural amino acid; see  specification as filed for detail ed description of substitutions, R-groups  and preferred embodiments
  MOD_RES (11)..(12): Any L- or D-natural amino acid and any non-natural amino acid; see  specification as filed for detail ed description of substitutions, R-groups  and preferred embodiments
  c-term may be amidated
QPDAINAPXTXXENFTNRKISVQRLASYRRITSSK

SEQ ID NO: 1374 - protein, 35 aa, Artificial Sequence
  Description of Artificial Sequence: Synthetic peptide
  MOD_RES (10)..(12): Any L- or D-natural amino acid and any non-natural amino acid; see  specification as filed for detail ed description of substitutions, R-groups  and preferred embodiments
  c-term may be amidated
QPDAINAPVXXXENFTNRKISVQRLASYRRITSSK

SEQ ID NO: 1375 - protein, 26 aa, Artificial Sequence
  Description of Artificial Sequence: Synthetic peptide
  MOD_RES (3)..(3): Any L- or D-natural amino acid and any non-natural amino acid; see  specification as filed for detail ed description of substitutions, R-groups  and preferred embodiments
  c-term may be amidated
AKXNFTNRKISVQRLASYRRITSSKE

SEQ ID NO: 1376 - protein, 15 aa, Artificial Sequence
  Description of Artificial Sequence: Synthetic peptide
  c-term may be amidated
PKEAVIFKTIVAKEI

SEQ ID NO: 1377 - protein, 19 aa, Artificial Sequence
  Description of Artificial Sequence: Synthetic peptide
  c-term may be amidated
ADPKQKWVQDSMDHLDKQT

SEQ ID NO: 1378 - protein, 41 aa, Artificial Sequence
  Description of Artificial Sequence: Synthetic peptide
  MOD_RES (24)..(27): Any L- or D-natural or non-natural amino acid, and this range may     encompass 1 or 4 residues; see specification as filed for detailed  description of substitutions, R-groups and preferred emb
  c-term may be amidated
YNFTNRKISVQRLASYRRITSSKXXXXKWVQDSMDHLDKQT

SEQ ID NO: 1379 - protein, 32 aa, Artificial Sequence
  Description of Artificial Sequence: Synthetic peptide
  MOD_RES (15)..(18): Any L- or D-natural or non-natural amino acid, and this range may     encompass 1 or 4 residues; see specification as filed for detailed  description of substitutions, R-groups and preferred emb
  c-term may be amidated
QPDAINAPVTCCYNXXXXKWVQDSMDHLDKQT

SEQ ID NO: 1380 - protein, 32 aa, Artificial Sequence
  Description of Artificial Sequence: Synthetic peptide
  MOD_RES (11)..(12): Any L- or D-natural amino acid and any non-natural amino acid; see  specification as filed for detail ed description of substitutions, R-groups  and preferred embodiments
  MOD_RES (15)..(18): Any L- or D-natural or non-natural amino acid, and this range may     encompass 1 or 4 residues; see specification as filed for detailed  description of substitutions, R-groups and preferred emb
  c-term may be amidated
QPDAINAPVTXXYNXXXXKWVQDSMDHLDKQT

SEQ ID NO: 1381 - protein, 32 aa, Artificial Sequence
  Description of Artificial Sequence: Synthetic peptide
  MOD_RES (1)..(1): Any L- or D-natural amino acid and any non-natural amino acid; see  specification as filed for detail ed description of substitutions, R-groups  and preferred embodiments
  MOD_RES (11)..(12): Any L- or D-natural amino acid and any non-natural amino acid; see  specification as filed for detail ed description of substitutions, R-groups  and preferred embodiments
  MOD_RES (15)..(18): Any L- or D-natural or non-natural amino acid, and this range may     encompass 1 or 4 residues; see specification as filed for detailed  description of substitutions, R-groups and preferred emb
  c-term may be amidated
XPDAINAPVTXXYNXXXXKWVQDSMDHLDKQT

SEQ ID NO: 1382 - protein, 32 aa, Artificial Sequence
  Description of Artificial Sequence: Synthetic peptide
  MOD_RES (2)..(2): Any L- or D-natural amino acid and any non-natural amino acid; see  specification as filed for detail ed description of substitutions, R-groups  and preferred embodiments
  MOD_RES (11)..(12): Any L- or D-natural amino acid and any non-natural amino acid; see  specification as filed for detail ed description of substitutions, R-groups  and preferred embodiments
  MOD_RES (15)..(18): Any L- or D-natural or non-natural amino acid, and this range may     encompass 1 or 4 residues; see specification as filed for detailed  description of substitutions, R-groups and preferred emb
  c-term may be amidated
QXDAINAPVTXXYNXXXXKWVQDSMDHLDKQT

SEQ ID NO: 1383 - protein, 32 aa, Artificial Sequence
  Description of Artificial Sequence: Synthetic peptide
  MOD_RES (3)..(3): Any L- or D-natural amino acid and any non-natural amino acid; see  specification as filed for detail ed description of substitutions, R-groups  and preferred embodiments
  MOD_RES (11)..(12): Any L- or D-natural amino acid and any non-natural amino acid; see  specification as filed for detail ed description of substitutions, R-groups  and preferred embodiments
  MOD_RES (15)..(18): Any L- or D-natural or non-natural amino acid, and this range may     encompass 1 or 4 residues; see specification as filed for detailed  description of substitutions, R-groups and preferred emb
  c-term may be amidated
QPXAINAPVTXXYNXXXXKWVQDSMDHLDKQT

SEQ ID NO: 1384 - protein, 32 aa, Artificial Sequence
  Description of Artificial Sequence: Synthetic peptide
  MOD_RES (4)..(4): Any L- or D-natural amino acid and any non-natural amino acid; see  specification as filed for detail ed description of substitutions, R-groups  and preferred embodiments
  MOD_RES (11)..(12): Any L- or D-natural amino acid and any non-natural amino acid; see  specification as filed for detail ed description of substitutions, R-groups  and preferred embodiments
  MOD_RES (15)..(18): Any L- or D-natural or non-natural amino acid, and this range may     encompass 1 or 4 residues; see specification as filed for detailed  description of substitutions, R-groups and preferred emb
  c-term may be amidated
QPDXINAPVTXXYNXXXXKWVQDSMDHLDKQT

SEQ ID NO: 1385 - protein, 32 aa, Artificial Sequence
  Description of Artificial Sequence: Synthetic peptide
  MOD_RES (5)..(5): Any L- or D-natural amino acid and any non-natural amino acid; see  specification as filed for detail ed description of substitutions, R-groups  and preferred embodiments
  MOD_RES (11)..(12): Any L- or D-natural amino acid and any non-natural amino acid; see  specification as filed for detail ed description of substitutions, R-groups  and preferred embodiments
  MOD_RES (15)..(18): Any L- or D-natural or non-natural amino acid, and this range may     encompass 1 or 4 residues; see specification as filed for detailed  description of substitutions, R-groups and preferred emb
  c-term may be amidated
QPDAXNAPVTXXYNXXXXKWVQDSMDHLDKQT

SEQ ID NO: 1386 - protein, 32 aa, Artificial Sequence
  Description of Artificial Sequence: Synthetic peptide
  MOD_RES (6)..(6): Any L- or D-natural amino acid and any non-natural amino acid; see  specification as filed for detail ed description of substitutions, R-groups  and preferred embodiments
  MOD_RES (11)..(12): Any L- or D-natural amino acid and any non-natural amino acid; see  specification as filed for detail ed description of substitutions, R-groups  and preferred embodiments
  MOD_RES (15)..(18): Any L- or D-natural or non-natural amino acid, and this range may     encompass 1 or 4 residues; see specification as filed for detailed  description of substitutions, R-groups and preferred emb
  c-term may be amidated
QPDAIXAPVTXXYNXXXXKWVQDSMDHLDKQT

SEQ ID NO: 1387 - protein, 32 aa, Artificial Sequence
  Description of Artificial Sequence: Synthetic peptide
  MOD_RES (7)..(7): Any L- or D-natural amino acid and any non-natural amino acid; see  specification as filed for detail ed description of substitutions, R-groups  and preferred embodiments
  MOD_RES (11)..(12): Any L- or D-natural amino acid and any non-natural amino acid; see  specification as filed for detail ed description of substitutions, R-groups  and preferred embodiments
  MOD_RES (15)..(18): Any L- or D-natural or non-natural amino acid, and this range may     encompass 1 or 4 residues; see specification as filed for detailed  description of substitutions, R-groups and preferred emb
  c-term may be amidated
QPDAINXPVTXXYNXXXXKWVQDSMDHLDKQT

SEQ ID NO: 1388 - protein, 32 aa, Artificial Sequence
  Description of Artificial Sequence: Synthetic peptide
  MOD_RES (8)..(8): Any L- or D-natural amino acid and any non-natural amino acid; see  specification as filed for detail ed description of substitutions, R-groups  and preferred embodiments
  MOD_RES (11)..(12): Any L- or D-natural amino acid and any non-natural amino acid; see  specification as filed for detail ed description of substitutions, R-groups  and preferred embodiments
  MOD_RES (15)..(18): Any L- or D-natural or non-natural amino acid, and this range may     encompass 1 or 4 residues; see specification as filed for detailed  description of substitutions, R-groups and preferred emb
  c-term may be amidated
QPDAINAXVTXXYNXXXXKWVQDSMDHLDKQT

SEQ ID NO: 1389 - protein, 32 aa, Artificial Sequence
  Description of Artificial Sequence: Synthetic peptide
  MOD_RES (9)..(9): Any L- or D-natural amino acid and any non-natural amino acid; see  specification as filed for detail ed description of substitutions, R-groups  and preferred embodiments
  MOD_RES (11)..(12): Any L- or D-natural amino acid and any non-natural amino acid; see  specification as filed for detail ed description of substitutions, R-groups  and preferred embodiments
  MOD_RES (15)..(18): Any L- or D-natural or non-natural amino acid, and this range may     encompass 1 or 4 residues; see specification as filed for detailed  description of substitutions, R-groups and preferred emb
  c-term may be amidated
QPDAINAPXTXXYNXXXXKWVQDSMDHLDKQT

SEQ ID NO: 1390 - protein, 32 aa, Artificial Sequence
  Description of Artificial Sequence: Synthetic peptide
  MOD_RES (10)..(12): Any L- or D-natural amino acid and any non-natural amino acid; see  specification as filed for detail ed description of substitutions, R-groups  and preferred embodiments
  MOD_RES (15)..(18): Any L- or D-natural or non-natural amino acid, and this range may     encompass 1 or 4 residues; see specification as filed for detailed  description of substitutions, R-groups and preferred emb
  c-term may be amidated
QPDAINAPVXXXYNXXXXKWVQDSMDHLDKQT

SEQ ID NO: 1391 - protein, 32 aa, Artificial Sequence
  Description of Artificial Sequence: Synthetic peptide
  MOD_RES (1)..(1): Any L- or D-natural amino acid and any non-natural amino acid; see  specification as filed for detail ed description of substitutions, R-groups  and preferred embodiments
  MOD_RES (11)..(13): Any L- or D-natural amino acid and any non-natural amino acid; see  specification as filed for detail ed description of substitutions, R-groups  and preferred embodiments
  MOD_RES (15)..(18): Any L- or D-natural or non-natural amino acid, and this range may     encompass 1 or 4 residues; see specification as filed for detailed  description of substitutions, R-groups and preferred emb
  c-term may be amidated
XPDAINAPVTXXXNXXXXKWVQDSMDHLDKQT

SEQ ID NO: 1392 - protein, 32 aa, Artificial Sequence
  Description of Artificial Sequence: Synthetic peptide
  MOD_RES (2)..(2): Any L- or D-natural amino acid and any non-natural amino acid; see  specification as filed for detail ed description of substitutions, R-groups  and preferred embodiments
  MOD_RES (11)..(13): Any L- or D-natural amino acid and any non-natural amino acid; see  specification as filed for detail ed description of substitutions, R-groups  and preferred embodiments
  MOD_RES (15)..(18): Any L- or D-natural or non-natural amino acid, and this range may     encompass 1 or 4 residues; see specification as filed for detailed  description of substitutions, R-groups and preferred emb
  c-term may be amidated
QXDAINAPVTXXXNXXXXKWVQDSMDHLDKQT

SEQ ID NO: 1393 - protein, 32 aa, Artificial Sequence
  Description of Artificial Sequence: Synthetic peptide
  MOD_RES (3)..(3): Any L- or D-natural amino acid and any non-natural amino acid; see  specification as filed for detail ed description of substitutions, R-groups  and preferred embodiments
  MOD_RES (11)..(13): Any L- or D-natural amino acid and any non-natural amino acid; see  specification as filed for detail ed description of substitutions, R-groups  and preferred embodiments
  MOD_RES (15)..(18): Any L- or D-natural or non-natural amino acid, and this range may     encompass 1 or 4 residues; see specification as filed for detailed  description of substitutions, R-groups and preferred emb
  c-term may be amidated
QPXAINAPVTXXXNXXXXKWVQDSMDHLDKQT

SEQ ID NO: 1394 - protein, 32 aa, Artificial Sequence
  Description of Artificial Sequence: Synthetic peptide
  MOD_RES (4)..(4): Any L- or D-natural amino acid and any non-natural amino acid; see  specification as filed for detail ed description of substitutions, R-groups  and preferred embodiments
  MOD_RES (11)..(13): Any L- or D-natural amino acid and any non-natural amino acid; see  specification as filed for detail ed description of substitutions, R-groups  and preferred embodiments
  MOD_RES (15)..(18): Any L- or D-natural or non-natural amino acid, and this range may     encompass 1 or 4 residues; see specification as filed for detailed  description of substitutions, R-groups and preferred emb
  c-term may be amidated
QPDXINAPVTXXXNXXXXKWVQDSMDHLDKQT

SEQ ID NO: 1395 - protein, 32 aa, Artificial Sequence
  Description of Artificial Sequence: Synthetic peptide
  MOD_RES (5)..(5): Any L- or D-natural amino acid and any non-natural amino acid; see  specification as filed for detail ed description of substitutions, R-groups  and preferred embodiments
  MOD_RES (11)..(13): Any L- or D-natural amino acid and any non-natural amino acid; see  specification as filed for detail ed description of substitutions, R-groups  and preferred embodiments
  MOD_RES (15)..(18): Any L- or D-natural or non-natural amino acid, and this range may     encompass 1 or 4 residues; see specification as filed for detailed  description of substitutions, R-groups and preferred emb
  c-term may be amidated
QPDAXNAPVTXXXNXXXXKWVQDSMDHLDKQT

SEQ ID NO: 1396 - protein, 32 aa, Artificial Sequence
  Description of Artificial Sequence: Synthetic peptide
  MOD_RES (6)..(6): Any L- or D-natural amino acid and any non-natural amino acid; see  specification as filed for detail ed description of substitutions, R-groups  and preferred embodiments
  MOD_RES (11)..(13): Any L- or D-natural amino acid and any non-natural amino acid; see  specification as filed for detail ed description of substitutions, R-groups  and preferred embodiments
  MOD_RES (15)..(18): Any L- or D-natural or non-natural amino acid, and this range may     encompass 1 or 4 residues; see specification as filed for detailed  description of substitutions, R-groups and preferred emb
  c-term may be amidated
QPDAIXAPVTXXXNXXXXKWVQDSMDHLDKQT

SEQ ID NO: 1397 - protein, 32 aa, Artificial Sequence
  Description of Artificial Sequence: Synthetic peptide
  MOD_RES (7)..(7): Any L- or D-natural amino acid and any non-natural amino acid; see  specification as filed for detail ed description of substitutions, R-groups  and preferred embodiments
  MOD_RES (11)..(13): Any L- or D-natural amino acid and any non-natural amino acid; see  specification as filed for detail ed description of substitutions, R-groups  and preferred embodiments
  MOD_RES (15)..(18): Any L- or D-natural or non-natural amino acid, and this range may     encompass 1 or 4 residues; see specification as filed for detailed  description of substitutions, R-groups and preferred emb
  c-term may be amidated
QPDAINXPVTXXXNXXXXKWVQDSMDHLDKQT

SEQ ID NO: 1398 - protein, 32 aa, Artificial Sequence
  Description of Artificial Sequence: Synthetic peptide
  MOD_RES (8)..(8): Any L- or D-natural amino acid and any non-natural amino acid; see  specification as filed for detail ed description of substitutions, R-groups  and preferred embodiments
  MOD_RES (11)..(13): Any L- or D-natural amino acid and any non-natural amino acid; see  specification as filed for detail ed description of substitutions, R-groups  and preferred embodiments
  MOD_RES (15)..(18): Any L- or D-natural or non-natural amino acid, and this range may     encompass 1 or 4 residues; see specification as filed for detailed  description of substitutions, R-groups and preferred emb
  c-term may be amidated
QPDAINAXVTXXXNXXXXKWVQDSMDHLDKQT

SEQ ID NO: 1399 - protein, 32 aa, Artificial Sequence
  Description of Artificial Sequence: Synthetic peptide
  MOD_RES (9)..(9): Any L- or D-natural amino acid and any non-natural amino acid; see  specification as filed for detail ed description of substitutions, R-groups  and preferred embodiments
  MOD_RES (11)..(13): Any L- or D-natural amino acid and any non-natural amino acid; see  specification as filed for detail ed description of substitutions, R-groups  and preferred embodiments
  MOD_RES (15)..(18): Any L- or D-natural or non-natural amino acid, and this range may     encompass 1 or 4 residues; see specification as filed for detailed  description of substitutions, R-groups and preferred emb
  c-term may be amidated
QPDAINAPXTXXXNXXXXKWVQDSMDHLDKQT

SEQ ID NO: 1400 - protein, 32 aa, Artificial Sequence
  Description of Artificial Sequence: Synthetic peptide
  MOD_RES (10)..(13): Any L- or D-natural amino acid and any non-natural amino acid; see  specification as filed for detail ed description of substitutions, R-groups  and preferred embodiments
  MOD_RES (15)..(18): Any L- or D-natural or non-natural amino acid, and this range may     encompass 1 or 4 residues; see specification as filed for detailed  description of substitutions, R-groups and preferred emb
  c-term may be amidated
QPDAINAPVXXXXNXXXXKWVQDSMDHLDKQT

SEQ ID NO: 1401 - protein, 32 aa, Artificial Sequence
  Description of Artificial Sequence: Synthetic peptide
  MOD_RES (1)..(1): Any L- or D-natural amino acid and any non-natural amino acid; see  specification as filed for detail ed description of substitutions, R-groups  and preferred embodiments
  MOD_RES (11)..(12): Any L- or D-natural amino acid and any non-natural amino acid; see  specification as filed for detail ed description of substitutions, R-groups  and preferred embodiments
  MOD_RES (14)..(14): Any L- or D-natural amino acid and any non-natural amino acid; see  specification as filed for detail ed description of substitutions, R-groups  and preferred embodiments
  MOD_RES (15)..(18): Any L- or D-natural or non-natural amino acid, and this range may     encompass 1 or 4 residues; see specification as filed for detailed  description of substitutions, R-groups and preferred emb
  c-term may be amidated
XPDAINAPVTXXYXXXXXKWVQDSMDHLDKQT

SEQ ID NO: 1402 - protein, 32 aa, Artificial Sequence
  Description of Artificial Sequence: Synthetic peptide
  MOD_RES (2)..(2): Any L- or D-natural amino acid and any non-natural amino acid; see  specification as filed for detail ed description of substitutions, R-groups  and preferred embodiments
  MOD_RES (11)..(12): Any L- or D-natural amino acid and any non-natural amino acid; see  specification as filed for detail ed description of substitutions, R-groups  and preferred embodiments
  MOD_RES (14)..(14): Any L- or D-natural amino acid and any non-natural amino acid; see  specification as filed for detail ed description of substitutions, R-groups  and preferred embodiments
  MOD_RES (15)..(18): Any L- or D-natural or non-natural amino acid, and this range may     encompass 1 or 4 residues; see specification as filed for detailed  description of substitutions, R-groups and preferred emb
  c-term may be amidated
QXDAINAPVTXXYXXXXXKWVQDSMDHLDKQT

SEQ ID NO: 1403 - protein, 32 aa, Artificial Sequence
  Description of Artificial Sequence: Synthetic peptide
  MOD_RES (3)..(3): Any L- or D-natural amino acid and any non-natural amino acid; see  specification as filed for detail ed description of substitutions, R-groups  and preferred embodiments
  MOD_RES (11)..(12): Any L- or D-natural amino acid and any non-natural amino acid; see  specification as filed for detail ed description of substitutions, R-groups  and preferred embodiments
  MOD_RES (14)..(14): Any L- or D-natural amino acid and any non-natural amino acid; see  specification as filed for detail ed description of substitutions, R-groups  and preferred embodiments
  MOD_RES (15)..(18): Any L- or D-natural or non-natural amino acid, and this range may     encompass 1 or 4 residues; see specification as filed for detailed  description of substitutions, R-groups and preferred emb
  c-term may be amidated
QPXAINAPVTXXYXXXXXKWVQDSMDHLDKQT

SEQ ID NO: 1404 - protein, 32 aa, Artificial Sequence
  Description of Artificial Sequence: Synthetic peptide
  MOD_RES (4)..(4): Any L- or D-natural amino acid and any non-natural amino acid; see  specification as filed for detail ed description of substitutions, R-groups  and preferred embodiments
  MOD_RES (11)..(12): Any L- or D-natural amino acid and any non-natural amino acid; see  specification as filed for detail ed description of substitutions, R-groups  and preferred embodiments
  MOD_RES (14)..(14): Any L- or D-natural amino acid and any non-natural amino acid; see  specification as filed for detail ed description of substitutions, R-groups  and preferred embodiments
  MOD_RES (15)..(18): Any L- or D-natural or non-natural amino acid, and this range may     encompass 1 or 4 residues; see specification as filed for detailed  description of substitutions, R-groups and preferred emb
  c-term may be amidated
QPDXINAPVTXXYXXXXXKWVQDSMDHLDKQT

SEQ ID NO: 1405 - protein, 32 aa, Artificial Sequence
  Description of Artificial Sequence: Synthetic peptide
  MOD_RES (5)..(5): Any L- or D-natural amino acid and any non-natural amino acid; see  specification as filed for detail ed description of substitutions, R-groups  and preferred embodiments
  MOD_RES (11)..(12): Any L- or D-natural amino acid and any non-natural amino acid; see  specification as filed for detail ed description of substitutions, R-groups  and preferred embodiments
  MOD_RES (14)..(14): Any L- or D-natural amino acid and any non-natural amino acid; see  specification as filed for detail ed description of substitutions, R-groups  and preferred embodiments
  MOD_RES (15)..(18): Any L- or D-natural or non-natural amino acid, and this range may     encompass 1 or 4 residues; see specification as filed for detailed  description of substitutions, R-groups and preferred emb
  c-term may be amidated
QPDAXNAPVTXXYXXXXXKWVQDSMDHLDKQT

SEQ ID NO: 1406 - protein, 32 aa, Artificial Sequence
  Description of Artificial Sequence: Synthetic peptide
  MOD_RES (6)..(6): Any L- or D-natural amino acid and any non-natural amino acid; see  specification as filed for detail ed description of substitutions, R-groups  and preferred embodiments
  MOD_RES (11)..(12): Any L- or D-natural amino acid and any non-natural amino acid; see  specification as filed for detail ed description of substitutions, R-groups  and preferred embodiments
  MOD_RES (14)..(14): Any L- or D-natural amino acid and any non-natural amino acid; see  specification as filed for detail ed description of substitutions, R-groups  and preferred embodiments
  MOD_RES (15)..(18): Any L- or D-natural or non-natural amino acid, and this range may     encompass 1 or 4 residues; see specification as filed for detailed  description of substitutions, R-groups and preferred emb
  c-term may be amidated
QPDAIXAPVTXXYXXXXXKWVQDSMDHLDKQT

SEQ ID NO: 1407 - protein, 32 aa, Artificial Sequence
  Description of Artificial Sequence: Synthetic peptide
  MOD_RES (7)..(7): Any L- or D-natural amino acid and any non-natural amino acid; see  specification as filed for detail ed description of substitutions, R-groups  and preferred embodiments
  MOD_RES (11)..(12): Any L- or D-natural amino acid and any non-natural amino acid; see  specification as filed for detail ed description of substitutions, R-groups  and preferred embodiments
  MOD_RES (14)..(14): Any L- or D-natural amino acid and any non-natural amino acid; see  specification as filed for detail ed description of substitutions, R-groups  and preferred embodiments
  MOD_RES (15)..(18): Any L- or D-natural or non-natural amino acid, and this range may     encompass 1 or 4 residues; see specification as filed for detailed  description of substitutions, R-groups and preferred emb
  c-term may be amidated
QPDAINXPVTXXYXXXXXKWVQDSMDHLDKQT

SEQ ID NO: 1408 - protein, 32 aa, Artificial Sequence
  Description of Artificial Sequence: Synthetic peptide
  MOD_RES (8)..(8): Any L- or D-natural amino acid and any non-natural amino acid; see  specification as filed for detail ed description of substitutions, R-groups  and preferred embodiments
  MOD_RES (11)..(12): Any L- or D-natural amino acid and any non-natural amino acid; see  specification as filed for detail ed description of substitutions, R-groups  and preferred embodiments
  MOD_RES (14)..(14): Any L- or D-natural amino acid and any non-natural amino acid; see  specification as filed for detail ed description of substitutions, R-groups  and preferred embodiments
  MOD_RES (15)..(18): Any L- or D-natural or non-natural amino acid, and this range may     encompass 1 or 4 residues; see specification as filed for detailed  description of substitutions, R-groups and preferred emb
  c-term may be amidated
QPDAINAXVTXXYXXXXXKWVQDSMDHLDKQT

SEQ ID NO: 1409 - protein, 32 aa, Artificial Sequence
  Description of Artificial Sequence: Synthetic peptide
  MOD_RES (9)..(9): Any L- or D-natural amino acid and any non-natural amino acid; see  specification as filed for detail ed description of substitutions, R-groups  and preferred embodiments
  MOD_RES (11)..(12): Any L- or D-natural amino acid and any non-natural amino acid; see  specification as filed for detail ed description of substitutions, R-groups  and preferred embodiments
  MOD_RES (14)..(14): Any L- or D-natural amino acid and any non-natural amino acid; see  specification as filed for detail ed description of substitutions, R-groups  and preferred embodiments
  MOD_RES (15)..(18): Any L- or D-natural or non-natural amino acid, and this range may     encompass 1 or 4 residues; see specification as filed for detailed  description of substitutions, R-groups and preferred emb
  c-term may be amidated
QPDAINAPXTXXYXXXXXKWVQDSMDHLDKQT

SEQ ID NO: 1410 - protein, 32 aa, Artificial Sequence
  Description of Artificial Sequence: Synthetic peptide
  MOD_RES (10)..(12): Any L- or D-natural amino acid and any non-natural amino acid; see  specification as filed for detail ed description of substitutions, R-groups  and preferred embodiments
  MOD_RES (14)..(14): Any L- or D-natural amino acid and any non-natural amino acid; see  specification as filed for detail ed description of substitutions, R-groups  and preferred embodiments
  MOD_RES (15)..(18): Any L- or D-natural or non-natural amino acid, and this range may     encompass 1 or 4 residues; see specification as filed for detailed  description of substitutions, R-groups and preferred emb
  c-term may be amidated
QPDAINAPVXXXYXXXXXKWVQDSMDHLDKQT

SEQ ID NO: 1411 - protein, 26 aa, Artificial Sequence
  Description of Artificial Sequence: Synthetic peptide
  MOD_RES (3)..(3): Any L- or D-natural amino acid and any non-natural amino acid; see  specification as filed for detail ed description of substitutions, R-groups  and preferred embodiments
  c-term may be amidated
AKXNFTNRKISVQRLASYRRITSSKE

SEQ ID NO: 1412 - protein, 26 aa, Artificial Sequence
  Description of Artificial Sequence: Synthetic peptide
  MOD_RES (3)..(3): Any L- or D-natural amino acid and any non-natural amino acid; see  specification as filed for detail ed description of substitutions, R-groups  and preferred embodiments
  c-term may be amidated
AKXNFTNRKISVQRLASYRRITSSKE

SEQ ID NO: 1413 - protein, 35 aa, Artificial Sequence; identical to SEQ ID NO: 1364
  Description of Artificial Sequence: Synthetic peptide
  MOD_RES (11)..(12): Any L- or D-natural amino acid and any non-natural amino acid; see  specification as filed for detail ed description of substitutions, R-groups  and preferred embodiments
  c-term may be amidated

SEQ ID NO: 1414 - protein, 32 aa, Artificial Sequence; identical to SEQ ID NO: 1379
  Description of Artificial Sequence: Synthetic peptide
  MOD_RES (15)..(18): Any L- or D-natural or non-natural amino acid, and this range may     encompass 1 or 4 residues; see specification as filed for detailed  description of substitutions, R-groups and preferred emb
  c-term may be amidated

SEQ ID NO: 1415 - protein, 32 aa, Artificial Sequence; identical to SEQ ID NO: 1380
  Description of Artificial Sequence: Synthetic peptide
  MOD_RES (11)..(12): Any L- or D-natural amino acid and any non-natural amino acid; see  specification as filed for detail ed description of substitutions, R-groups  and preferred embodiments
  MOD_RES (15)..(18): Any L- or D-natural or non-natural amino acid, and this range may     encompass 1 or 4 residues; see specification as filed for detailed  description of substitutions, R-groups and preferred emb
  c-term may be amidated

SEQ ID NO: 1416 - protein, 41 aa, Artificial Sequence; identical to SEQ ID NO: 1378
  Description of Artificial Sequence: Synthetic peptide
  MOD_RES (24)..(27): Any L- or D-natural or non-natural amino acid, and this range may     encompass 1 or 4 residues; see specification as filed for detailed  description of substitutions, R-groups and preferred emb
  c-term may be amidated

SEQ ID NO: 1417 - protein, 32 aa, Artificial Sequence; identical to SEQ ID NO: 1381
  Description of Artificial Sequence: Synthetic peptide
  MOD_RES (1)..(1): Any L- or D-natural amino acid and any non-natural amino acid; see  specification as filed for detail ed description of substitutions, R-groups  and preferred embodiments
  MOD_RES (11)..(12): Any L- or D-natural amino acid and any non-natural amino acid; see  specification as filed for detail ed description of substitutions, R-groups  and preferred embodiments
  MOD_RES (15)..(18): Any L- or D-natural or non-natural amino acid, and this range may     encompass 1 or 4 residues; see specification as filed for detailed  description of substitutions, R-groups and preferred emb
  c-term may be amidated

SEQ ID NO: 1418 - protein, 32 aa, Artificial Sequence; identical to SEQ ID NO: 1382
  Description of Artificial Sequence: Synthetic peptide
  MOD_RES (2)..(2): Any L- or D-natural amino acid and any non-natural amino acid; see  specification as filed for detail ed description of substitutions, R-groups  and preferred embodiments
  MOD_RES (11)..(12): Any L- or D-natural amino acid and any non-natural amino acid; see  specification as filed for detail ed description of substitutions, R-groups  and preferred embodiments
  MOD_RES (15)..(18): Any L- or D-natural or non-natural amino acid, and this range may     encompass 1 or 4 residues; see specification as filed for detailed  description of substitutions, R-groups and preferred emb
  c-term may be amidated

SEQ ID NO: 1419 - protein, 32 aa, Artificial Sequence; identical to SEQ ID NO: 1383
  Description of Artificial Sequence: Synthetic peptide
  MOD_RES (3)..(3): Any L- or D-natural amino acid and any non-natural amino acid; see  specification as filed for detail ed description of substitutions, R-groups  and preferred embodiments
  MOD_RES (11)..(12): Any L- or D-natural amino acid and any non-natural amino acid; see  specification as filed for detail ed description of substitutions, R-groups  and preferred embodiments
  MOD_RES (15)..(18): Any L- or D-natural or non-natural amino acid, and this range may     encompass 1 or 4 residues; see specification as filed for detailed  description of substitutions, R-groups and preferred emb
  c-term may be amidated

SEQ ID NO: 1420 - protein, 32 aa, Artificial Sequence; identical to SEQ ID NO: 1384
  Description of Artificial Sequence: Synthetic peptide
  MOD_RES (4)..(4): Any L- or D-natural amino acid and any non-natural amino acid; see  specification as filed for detail ed description of substitutions, R-groups  and preferred embodiments
  MOD_RES (11)..(12): Any L- or D-natural amino acid and any non-natural amino acid; see  specification as filed for detail ed description of substitutions, R-groups  and preferred embodiments
  MOD_RES (15)..(18): Any L- or D-natural or non-natural amino acid, and this range may     encompass 1 or 4 residues; see specification as filed for detailed  description of substitutions, R-groups and preferred emb
  c-term may be amidated

SEQ ID NO: 1421 - protein, 32 aa, Artificial Sequence; identical to SEQ ID NO: 1385
  Description of Artificial Sequence: Synthetic peptide
  MOD_RES (5)..(5): Any L- or D-natural amino acid and any non-natural amino acid; see  specification as filed for detail ed description of substitutions, R-groups  and preferred embodiments
  MOD_RES (11)..(12): Any L- or D-natural amino acid and any non-natural amino acid; see  specification as filed for detail ed description of substitutions, R-groups  and preferred embodiments
  MOD_RES (15)..(18): Any L- or D-natural or non-natural amino acid, and this range may     encompass 1 or 4 residues; see specification as filed for detailed  description of substitutions, R-groups and preferred emb
  c-term may be amidated

SEQ ID NO: 1422 - protein, 32 aa, Artificial Sequence; identical to SEQ ID NO: 1386
  Description of Artificial Sequence: Synthetic peptide
  MOD_RES (6)..(6): Any L- or D-natural amino acid and any non-natural amino acid; see  specification as filed for detail ed description of substitutions, R-groups  and preferred embodiments
  MOD_RES (11)..(12): Any L- or D-natural amino acid and any non-natural amino acid; see  specification as filed for detail ed description of substitutions, R-groups  and preferred embodiments
  MOD_RES (15)..(18): Any L- or D-natural or non-natural amino acid, and this range may     encompass 1 or 4 residues; see specification as filed for detailed  description of substitutions, R-groups and preferred emb
  c-term may be amidated

SEQ ID NO: 1423 - protein, 32 aa, Artificial Sequence; identical to SEQ ID NO: 1387
  Description of Artificial Sequence: Synthetic peptide
  MOD_RES (7)..(7): Any L- or D-natural amino acid and any non-natural amino acid; see  specification as filed for detail ed description of substitutions, R-groups  and preferred embodiments
  MOD_RES (11)..(12): Any L- or D-natural amino acid and any non-natural amino acid; see  specification as filed for detail ed description of substitutions, R-groups  and preferred embodiments
  MOD_RES (15)..(18): Any L- or D-natural or non-natural amino acid, and this range may     encompass 1 or 4 residues; see specification as filed for detailed  description of substitutions, R-groups and preferred emb
  c-term may be amidated

SEQ ID NO: 1424 - protein, 32 aa, Artificial Sequence; identical to SEQ ID NO: 1388
  Description of Artificial Sequence: Synthetic peptide
  MOD_RES (8)..(8): Any L- or D-natural amino acid and any non-natural amino acid; see  specification as filed for detail ed description of substitutions, R-groups  and preferred embodiments
  MOD_RES (11)..(12): Any L- or D-natural amino acid and any non-natural amino acid; see  specification as filed for detail ed description of substitutions, R-groups  and preferred embodiments
  MOD_RES (15)..(18): Any L- or D-natural or non-natural amino acid, and this range may     encompass 1 or 4 residues; see specification as filed for detailed  description of substitutions, R-groups and preferred emb
  c-term may be amidated

SEQ ID NO: 1425 - protein, 32 aa, Artificial Sequence; identical to SEQ ID NO: 1389
  Description of Artificial Sequence: Synthetic peptide
  MOD_RES (9)..(9): Any L- or D-natural amino acid and any non-natural amino acid; see  specification as filed for detail ed description of substitutions, R-groups  and preferred embodiments
  MOD_RES (11)..(12): Any L- or D-natural amino acid and any non-natural amino acid; see  specification as filed for detail ed description of substitutions, R-groups  and preferred embodiments
  MOD_RES (15)..(18): Any L- or D-natural or non-natural amino acid, and this range may     encompass 1 or 4 residues; see specification as filed for detailed  description of substitutions, R-groups and preferred emb
  c-term may be amidated

SEQ ID NO: 1426 - protein, 32 aa, Artificial Sequence; identical to SEQ ID NO: 1390
  Description of Artificial Sequence: Synthetic peptide
  MOD_RES (10)..(12): Any L- or D-natural amino acid and any non-natural amino acid; see  specification as filed for detail ed description of substitutions, R-groups  and preferred embodiments
  MOD_RES (15)..(18): Any L- or D-natural or non-natural amino acid, and this range may     encompass 1 or 4 residues; see specification as filed for detailed  description of substitutions, R-groups and preferred emb
  c-term may be amidated

SEQ ID NO: 1427 - protein, 32 aa, Artificial Sequence; identical to SEQ ID NO: 1391
  Description of Artificial Sequence: Synthetic peptide
  MOD_RES (1)..(1): Any L- or D-natural amino acid and any non-natural amino acid; see  specification as filed for detail ed description of substitutions, R-groups  and preferred embodiments
  MOD_RES (11)..(13): Any L- or D-natural amino acid and any non-natural amino acid; see  specification as filed for detail ed description of substitutions, R-groups  and preferred embodiments
  MOD_RES (15)..(18): Any L- or D-natural or non-natural amino acid, and this range may     encompass 1 or 4 residues; see specification as filed for detailed  description of substitutions, R-groups and preferred emb
  c-term may be amidated

SEQ ID NO: 1428 - protein, 32 aa, Artificial Sequence; identical to SEQ ID NO: 1392
  Description of Artificial Sequence: Synthetic peptide
  MOD_RES (2)..(2): Any L- or D-natural amino acid and any non-natural amino acid; see  specification as filed for detail ed description of substitutions, R-groups  and preferred embodiments
  MOD_RES (11)..(13): Any L- or D-natural amino acid and any non-natural amino acid; see  specification as filed for detail ed description of substitutions, R-groups  and preferred embodiments
  MOD_RES (15)..(18): Any L- or D-natural or non-natural amino acid, and this range may     encompass 1 or 4 residues; see specification as filed for detailed  description of substitutions, R-groups and preferred emb
  c-term may be amidated

SEQ ID NO: 1429 - protein, 32 aa, Artificial Sequence; identical to SEQ ID NO: 1393
  Description of Artificial Sequence: Synthetic peptide
  MOD_RES (3)..(3): Any L- or D-natural amino acid and any non-natural amino acid; see  specification as filed for detail ed description of substitutions, R-groups  and preferred embodiments
  MOD_RES (11)..(13): Any L- or D-natural amino acid and any non-natural amino acid; see  specification as filed for detail ed description of substitutions, R-groups  and preferred embodiments
  MOD_RES (15)..(18): Any L- or D-natural or non-natural amino acid, and this range may     encompass 1 or 4 residues; see specification as filed for detailed  description of substitutions, R-groups and preferred emb
  c-term may be amidated

SEQ ID NO: 1430 - protein, 32 aa, Artificial Sequence; identical to SEQ ID NO: 1394
  Description of Artificial Sequence: Synthetic peptide
  MOD_RES (4)..(4): Any L- or D-natural amino acid and any non-natural amino acid; see  specification as filed for detail ed description of substitutions, R-groups  and preferred embodiments
  MOD_RES (11)..(13): Any L- or D-natural amino acid and any non-natural amino acid; see  specification as filed for detail ed description of substitutions, R-groups  and preferred embodiments
  MOD_RES (15)..(18): Any L- or D-natural or non-natural amino acid, and this range may     encompass 1 or 4 residues; see specification as filed for detailed  description of substitutions, R-groups and preferred emb
  c-term may be amidated

SEQ ID NO: 1431 - protein, 32 aa, Artificial Sequence; identical to SEQ ID NO: 1395
  Description of Artificial Sequence: Synthetic peptide
  MOD_RES (5)..(5): Any L- or D-natural amino acid and any non-natural amino acid; see  specification as filed for detail ed description of substitutions, R-groups  and preferred embodiments
  MOD_RES (11)..(13): Any L- or D-natural amino acid and any non-natural amino acid; see  specification as filed for detail ed description of substitutions, R-groups  and preferred embodiments
  MOD_RES (15)..(18): Any L- or D-natural or non-natural amino acid, and this range may     encompass 1 or 4 residues; see specification as filed for detailed  description of substitutions, R-groups and preferred emb
  c-term may be amidated

SEQ ID NO: 1432 - protein, 32 aa, Artificial Sequence; identical to SEQ ID NO: 1396
  Description of Artificial Sequence: Synthetic peptide
  MOD_RES (6)..(6): Any L- or D-natural amino acid and any non-natural amino acid; see  specification as filed for detail ed description of substitutions, R-groups  and preferred embodiments
  MOD_RES (11)..(13): Any L- or D-natural amino acid and any non-natural amino acid; see  specification as filed for detail ed description of substitutions, R-groups  and preferred embodiments
  MOD_RES (15)..(18): Any L- or D-natural or non-natural amino acid, and this range may     encompass 1 or 4 residues; see specification as filed for detailed  description of substitutions, R-groups and preferred emb
  c-term may be amidated

SEQ ID NO: 1433 - protein, 32 aa, Artificial Sequence; identical to SEQ ID NO: 1397
  Description of Artificial Sequence: Synthetic peptide
  MOD_RES (7)..(7): Any L- or D-natural amino acid and any non-natural amino acid; see  specification as filed for detail ed description of substitutions, R-groups  and preferred embodiments
  MOD_RES (11)..(13): Any L- or D-natural amino acid and any non-natural amino acid; see  specification as filed for detail ed description of substitutions, R-groups  and preferred embodiments
  MOD_RES (15)..(18): Any L- or D-natural or non-natural amino acid, and this range may     encompass 1 or 4 residues; see specification as filed for detailed  description of substitutions, R-groups and preferred emb
  c-term may be amidated

SEQ ID NO: 1434 - protein, 32 aa, Artificial Sequence; identical to SEQ ID NO: 1398
  Description of Artificial Sequence: Synthetic peptide
  MOD_RES (8)..(8): Any L- or D-natural amino acid and any non-natural amino acid; see  specification as filed for detail ed description of substitutions, R-groups  and preferred embodiments
  MOD_RES (11)..(13): Any L- or D-natural amino acid and any non-natural amino acid; see  specification as filed for detail ed description of substitutions, R-groups  and preferred embodiments
  MOD_RES (15)..(18): Any L- or D-natural or non-natural amino acid, and this range may     encompass 1 or 4 residues; see specification as filed for detailed  description of substitutions, R-groups and preferred emb
  c-term may be amidated

SEQ ID NO: 1435 - protein, 32 aa, Artificial Sequence; identical to SEQ ID NO: 1399
  Description of Artificial Sequence: Synthetic peptide
  MOD_RES (9)..(9): Any L- or D-natural amino acid and any non-natural amino acid; see  specification as filed for detail ed description of substitutions, R-groups  and preferred embodiments
  MOD_RES (11)..(13): Any L- or D-natural amino acid and any non-natural amino acid; see  specification as filed for detail ed description of substitutions, R-groups  and preferred embodiments
  MOD_RES (15)..(18): Any L- or D-natural or non-natural amino acid, and this range may     encompass 1 or 4 residues; see specification as filed for detailed  description of substitutions, R-groups and preferred emb
  c-term may be amidated

SEQ ID NO: 1436 - protein, 32 aa, Artificial Sequence; identical to SEQ ID NO: 1400
  Description of Artificial Sequence: Synthetic peptide
  MOD_RES (10)..(13): Any L- or D-natural amino acid and any non-natural amino acid; see  specification as filed for detail ed description of substitutions, R-groups  and preferred embodiments
  MOD_RES (15)..(18): Any L- or D-natural or non-natural amino acid, and this range may     encompass 1 or 4 residues; see specification as filed for detailed  description of substitutions, R-groups and preferred emb
  c-term may be amidated

SEQ ID NO: 1437 - protein, 32 aa, Artificial Sequence; identical to SEQ ID NO: 1401
  Description of Artificial Sequence: Synthetic peptide
  MOD_RES (1)..(1): Any L- or D-natural amino acid and any non-natural amino acid; see  specification as filed for detail ed description of substitutions, R-groups  and preferred embodiments
  MOD_RES (11)..(12): Any L- or D-natural amino acid and any non-natural amino acid; see  specification as filed for detail ed description of substitutions, R-groups  and preferred embodiments
  MOD_RES (14)..(14): Any L- or D-natural amino acid and any non-natural amino acid; see  specification as filed for detail ed description of substitutions, R-groups  and preferred embodiments
  MOD_RES (15)..(18): Any L- or D-natural or non-natural amino acid, and this range may     encompass 1 or 4 residues; see specification as filed for detailed  description of substitutions, R-groups and preferred emb
  c-term may be amidated

SEQ ID NO: 1438 - protein, 32 aa, Artificial Sequence; identical to SEQ ID NO: 1402
  Description of Artificial Sequence: Synthetic peptide
  MOD_RES (2)..(2): Any L- or D-natural amino acid and any non-natural amino acid; see  specification as filed for detail ed description of substitutions, R-groups  and preferred embodiments
  MOD_RES (11)..(12): Any L- or D-natural amino acid and any non-natural amino acid; see  specification as filed for detail ed description of substitutions, R-groups  and preferred embodiments
  MOD_RES (14)..(14): Any L- or D-natural amino acid and any non-natural amino acid; see  specification as filed for detail ed description of substitutions, R-groups  and preferred embodiments
  MOD_RES (15)..(18): Any L- or D-natural or non-natural amino acid, and this range may     encompass 1 or 4 residues; see specification as filed for detailed  description of substitutions, R-groups and preferred emb
  c-term may be amidated

SEQ ID NO: 1439 - protein, 32 aa, Artificial Sequence; identical to SEQ ID NO: 1403
  Description of Artificial Sequence: Synthetic peptide
  MOD_RES (3)..(3): Any L- or D-natural amino acid and any non-natural amino acid; see  specification as filed for detail ed description of substitutions, R-groups  and preferred embodiments
  MOD_RES (11)..(12): Any L- or D-natural amino acid and any non-natural amino acid; see  specification as filed for detail ed description of substitutions, R-groups  and preferred embodiments
  MOD_RES (14)..(14): Any L- or D-natural amino acid and any non-natural amino acid; see  specification as filed for detail ed description of substitutions, R-groups  and preferred embodiments
  MOD_RES (15)..(18): Any L- or D-natural or non-natural amino acid, and this range may     encompass 1 or 4 residues; see specification as filed for detailed  description of substitutions, R-groups and preferred emb
  c-term may be amidated

SEQ ID NO: 1440 - protein, 32 aa, Artificial Sequence; identical to SEQ ID NO: 1404
  Description of Artificial Sequence: Synthetic peptide
  MOD_RES (4)..(4): Any L- or D-natural amino acid and any non-natural amino acid; see  specification as filed for detail ed description of substitutions, R-groups  and preferred embodiments
  MOD_RES (11)..(12): Any L- or D-natural amino acid and any non-natural amino acid; see  specification as filed for detail ed description of substitutions, R-groups  and preferred embodiments
  MOD_RES (14)..(14): Any L- or D-natural amino acid and any non-natural amino acid; see  specification as filed for detail ed description of substitutions, R-groups  and preferred embodiments
  MOD_RES (15)..(18): Any L- or D-natural or non-natural amino acid, and this range may     encompass 1 or 4 residues; see specification as filed for detailed  description of substitutions, R-groups and preferred emb
  c-term may be amidated

SEQ ID NO: 1441 - protein, 32 aa, Artificial Sequence; identical to SEQ ID NO: 1405
  Description of Artificial Sequence: Synthetic peptide
  MOD_RES (5)..(5): Any L- or D-natural amino acid and any non-natural amino acid; see  specification as filed for detail ed description of substitutions, R-groups  and preferred embodiments
  MOD_RES (11)..(12): Any L- or D-natural amino acid and any non-natural amino acid; see  specification as filed for detail ed description of substitutions, R-groups  and preferred embodiments
  MOD_RES (14)..(14): Any L- or D-natural amino acid and any non-natural amino acid; see  specification as filed for detail ed description of substitutions, R-groups  and preferred embodiments
  MOD_RES (15)..(18): Any L- or D-natural or non-natural amino acid, and this range may     encompass 1 or 4 residues; see specification as filed for detailed  description of substitutions, R-groups and preferred emb
  c-term may be amidated

SEQ ID NO: 1442 - protein, 32 aa, Artificial Sequence; identical to SEQ ID NO: 1406
  Description of Artificial Sequence: Synthetic peptide
  MOD_RES (6)..(6): Any L- or D-natural amino acid and any non-natural amino acid; see  specification as filed for detail ed description of substitutions, R-groups  and preferred embodiments
  MOD_RES (11)..(12): Any L- or D-natural amino acid and any non-natural amino acid; see  specification as filed for detail ed description of substitutions, R-groups  and preferred embodiments
  MOD_RES (14)..(14): Any L- or D-natural amino acid and any non-natural amino acid; see  specification as filed for detail ed description of substitutions, R-groups  and preferred embodiments
  MOD_RES (15)..(18): Any L- or D-natural or non-natural amino acid, and this range may     encompass 1 or 4 residues; see specification as filed for detailed  description of substitutions, R-groups and preferred emb
  c-term may be amidated

SEQ ID NO: 1443 - protein, 32 aa, Artificial Sequence; identical to SEQ ID NO: 1407
  Description of Artificial Sequence: Synthetic peptide
  MOD_RES (7)..(7): Any L- or D-natural amino acid and any non-natural amino acid; see  specification as filed for detail ed description of substitutions, R-groups  and preferred embodiments
  MOD_RES (11)..(12): Any L- or D-natural amino acid and any non-natural amino acid; see  specification as filed for detail ed description of substitutions, R-groups  and preferred embodiments
  MOD_RES (14)..(14): Any L- or D-natural amino acid and any non-natural amino acid; see  specification as filed for detail ed description of substitutions, R-groups  and preferred embodiments
  MOD_RES (15)..(18): Any L- or D-natural or non-natural amino acid, and this range may     encompass 1 or 4 residues; see specification as filed for detailed  description of substitutions, R-groups and preferred emb
  c-term may be amidated

SEQ ID NO: 1444 - protein, 32 aa, Artificial Sequence; identical to SEQ ID NO: 1408
  Description of Artificial Sequence: Synthetic peptide
  MOD_RES (8)..(8): Any L- or D-natural amino acid and any non-natural amino acid; see  specification as filed for detail ed description of substitutions, R-groups  and preferred embodiments
  MOD_RES (11)..(12): Any L- or D-natural amino acid and any non-natural amino acid; see  specification as filed for detail ed description of substitutions, R-groups  and preferred embodiments
  MOD_RES (14)..(14): Any L- or D-natural amino acid and any non-natural amino acid; see  specification as filed for detail ed description of substitutions, R-groups  and preferred embodiments
  MOD_RES (15)..(18): Any L- or D-natural or non-natural amino acid, and this range may     encompass 1 or 4 residues; see specification as filed for detailed  description of substitutions, R-groups and preferred emb
  c-term may be amidated

SEQ ID NO: 1445 - protein, 32 aa, Artificial Sequence; identical to SEQ ID NO: 1409
  Description of Artificial Sequence: Synthetic peptide
  MOD_RES (9)..(9): Any L- or D-natural amino acid and any non-natural amino acid; see  specification as filed for detail ed description of substitutions, R-groups  and preferred embodiments
  MOD_RES (11)..(12): Any L- or D-natural amino acid and any non-natural amino acid; see  specification as filed for detail ed description of substitutions, R-groups  and preferred embodiments
  MOD_RES (14)..(14): Any L- or D-natural amino acid and any non-natural amino acid; see  specification as filed for detail ed description of substitutions, R-groups  and preferred embodiments
  MOD_RES (15)..(18): Any L- or D-natural or non-natural amino acid, and this range may     encompass 1 or 4 residues; see specification as filed for detailed  description of substitutions, R-groups and preferred emb
  c-term may be amidated

SEQ ID NO: 1446 - protein, 32 aa, Artificial Sequence; identical to SEQ ID NO: 1410
  Description of Artificial Sequence: Synthetic peptide
  MOD_RES (10)..(12): Any L- or D-natural amino acid and any non-natural amino acid; see  specification as filed for detail ed description of substitutions, R-groups  and preferred embodiments
  MOD_RES (14)..(14): Any L- or D-natural amino acid and any non-natural amino acid; see  specification as filed for detail ed description of substitutions, R-groups  and preferred embodiments
  MOD_RES (15)..(18): Any L- or D-natural or non-natural amino acid, and this range may     encompass 1 or 4 residues; see specification as filed for detailed  description of substitutions, R-groups and preferred emb
  c-term may be amidated

SEQ ID NO: 1447 - protein, 7 aa, Artificial Sequence
  Description of Artificial Sequence: Synthetic peptide
  c-term may be amidated
ILPIASS

SEQ ID NO: 1448 - protein, 26 aa, Artificial Sequence
  Description of Artificial Sequence: Synthetic peptide
  c-term may be amidated
ILPIASSCCTEVSHHISRRLLERVNM

SEQ ID NO: 1449 - protein, 26 aa, Artificial Sequence
  Description of Artificial Sequence: Synthetic peptide
  MOD_RES (8)..(9): Any L- or D-natural amino acid and any non-natural amino acid; see  specification as filed for detail ed description of substitutions, R-groups  and preferred embodiments
  c-term may be amidated
ILPIASSXXTEVSHHISRRLLERVNM

SEQ ID NO: 1450 - protein, 26 aa, Artificial Sequence
  Description of Artificial Sequence: Synthetic peptide
  MOD_RES (1)..(1): Any L- or D-natural amino acid and any non-natural amino acid; see  specification as filed for detail ed description of substitutions, R-groups  and preferred embodiments
  MOD_RES (8)..(9): Any L- or D-natural amino acid and any non-natural amino acid; see  specification as filed for detail ed description of substitutions, R-groups  and preferred embodiments
  c-term may be amidated
XLPIASSXXTEVSHHISRRLLERVNM

SEQ ID NO: 1451 - protein, 26 aa, Artificial Sequence
  Description of Artificial Sequence: Synthetic peptide
  MOD_RES (2)..(2): Any L- or D-natural amino acid and any non-natural amino acid; see  specification as filed for detail ed description of substitutions, R-groups  and preferred embodiments
  MOD_RES (8)..(9): Any L- or D-natural amino acid and any non-natural amino acid; see  specification as filed for detail ed description of substitutions, R-groups  and preferred embodiments
  c-term may be amidated
IXPIASSXXTEVSHHISRRLLERVNM

SEQ ID NO: 1452 - protein, 26 aa, Artificial Sequence
  Description of Artificial Sequence: Synthetic peptide
  MOD_RES (3)..(3): Any L- or D-natural amino acid and any non-natural amino acid; see  specification as filed for detail ed description of substitutions, R-groups  and preferred embodiments
  MOD_RES (8)..(9): Any L- or D-natural amino acid and any non-natural amino acid; see  specification as filed for detail ed description of substitutions, R-groups  and preferred embodiments
  c-term may be amidated
ILXIASSXXTEVSHHISRRLLERVNM

SEQ ID NO: 1453 - protein, 26 aa, Artificial Sequence
  Description of Artificial Sequence: Synthetic peptide
  MOD_RES (4)..(4): Any L- or D-natural amino acid and any non-natural amino acid; see  specification as filed for detail ed description of substitutions, R-groups  and preferred embodiments
  MOD_RES (8)..(9): Any L- or D-natural amino acid and any non-natural amino acid; see  specification as filed for detail ed description of substitutions, R-groups  and preferred embodiments
  c-term may be amidated
ILPXASSXXTEVSHHISRRLLERVNM

SEQ ID NO: 1454 - protein, 26 aa, Artificial Sequence
  Description of Artificial Sequence: Synthetic peptide
  MOD_RES (5)..(5): Any L- or D-natural amino acid and any non-natural amino acid; see  specification as filed for detail ed description of substitutions, R-groups  and preferred embodiments
  MOD_RES (8)..(9): Any L- or D-natural amino acid and any non-natural amino acid; see  specification as filed for detail ed description of substitutions, R-groups  and preferred embodiments
  c-term may be amidated
ILPIXSSXXTEVSHHISRRLLERVNM

SEQ ID NO: 1455 - protein, 26 aa, Artificial Sequence
  Description of Artificial Sequence: Synthetic peptide
  MOD_RES (6)..(6): Any L- or D-natural amino acid and any non-natural amino acid; see  specification as filed for detail ed description of substitutions, R-groups  and preferred embodiments
  MOD_RES (8)..(9): Any L- or D-natural amino acid and any non-natural amino acid; see  specification as filed for detail ed description of substitutions, R-groups  and preferred embodiments
  c-term may be amidated
ILPIAXSXXTEVSHHISRRLLERVNM

SEQ ID NO: 1456 - protein, 26 aa, Artificial Sequence
  Description of Artificial Sequence: Synthetic peptide
  MOD_RES (7)..(9): Any L- or D-natural amino acid and any non-natural amino acid; see  specification as filed for detail ed description of substitutions, R-groups  and preferred embodiments
  c-term may be amidated
ILPIASXXXTEVSHHISRRLLERVNM

SEQ ID NO: 1457 - protein, 17 aa, Artificial Sequence
  Description of Artificial Sequence: Synthetic peptide
  c-term may be amidated
TEVSHHISRRLLERVNM

SEQ ID NO: 1458 - protein, 23 aa, Artificial Sequence
  Description of Artificial Sequence: Synthetic peptide
  c-term may be amidated
RIQRADGDCDLAAVILHVKRRRI

SEQ ID NO: 1459 - protein, 25 aa, Artificial Sequence
  Description of Artificial Sequence: Synthetic peptide
  c-term may be amidated
VSPHNHTVKQWMKVQAAKKNGKGNV

SEQ ID NO: 1460 - protein, 28 aa, Artificial Sequence
  Description of Artificial Sequence: Synthetic peptide
  c-term may be amidated
HRKKHHGKRNSNRAHQGKHETYGHKTPY

SEQ ID NO: 1461 - protein, 32 aa, Artificial Sequence
  Description of Artificial Sequence: Synthetic peptide
  MOD_RES (15)..(18): Any L- or D-natural or non-natural amino acid, and this range may     encompass 1 or 4 residues; see specification as filed for detailed  description of substitutions, R-groups and preferred emb
  c-term may be amidated
ILPIASSCCTEVSHXXXXHRKKHHGKRNSDRA

SEQ ID NO: 1462 - protein, 32 aa, Artificial Sequence
  Description of Artificial Sequence: Synthetic peptide
  MOD_RES (1)..(1): Any L- or D-natural amino acid and any non-natural amino acid; see  specification as filed for detail ed description of substitutions, R-groups  and preferred embodiments
  MOD_RES (8)..(9): Any L- or D-natural amino acid and any non-natural amino acid; see  specification as filed for detail ed description of substitutions, R-groups  and preferred embodiments
  MOD_RES (15)..(18): Any L- or D-natural or non-natural amino acid, and this range may     encompass 1 or 4 residues; see specification as filed for detailed  description of substitutions, R-groups and preferred emb
  c-term may be amidated
XLPIASSXXTEVSHXXXXHRKKHHGKRNSDRA

SEQ ID NO: 1463 - protein, 32 aa, Artificial Sequence
  Description of Artificial Sequence: Synthetic peptide
  MOD_RES (2)..(2): Any L- or D-natural amino acid and any non-natural amino acid; see  specification as filed for detail ed description of substitutions, R-groups  and preferred embodiments
  MOD_RES (8)..(9): Any L- or D-natural amino acid and any non-natural amino acid; see  specification as filed for detail ed description of substitutions, R-groups  and preferred embodiments
  MOD_RES (15)..(18): Any L- or D-natural or non-natural amino acid, and this range may     encompass 1 or 4 residues; see specification as filed for detailed  description of substitutions, R-groups and preferred emb
  c-term may be amidated
IXPIASSXXTEVSHXXXXHRKKHHGKRNSDRA

SEQ ID NO: 1464 - protein, 32 aa, Artificial Sequence
  Description of Artificial Sequence: Synthetic peptide
  MOD_RES (3)..(3): Any L- or D-natural amino acid and any non-natural amino acid; see  specification as filed for detail ed description of substitutions, R-groups  and preferred embodiments
  MOD_RES (8)..(9): Any L- or D-natural amino acid and any non-natural amino acid; see  specification as filed for detail ed description of substitutions, R-groups  and preferred embodiments
  MOD_RES (15)..(18): Any L- or D-natural or non-natural amino acid, and this range may     encompass 1 or 4 residues; see specification as filed for detailed  description of substitutions, R-groups and preferred emb
  c-term may be amidated
ILXIASSXXTEVSHXXXXHRKKHHGKRNSDRA

SEQ ID NO: 1465 - protein, 32 aa, Artificial Sequence
  Description of Artificial Sequence: Synthetic peptide
  MOD_RES (4)..(4): Any L- or D-natural amino acid and any non-natural amino acid; see  specification as filed for detail ed description of substitutions, R-groups  and preferred embodiments
  MOD_RES (8)..(9): Any L- or D-natural amino acid and any non-natural amino acid; see  specification as filed for detail ed description of substitutions, R-groups  and preferred embodiments
  MOD_RES (15)..(18): Any L- or D-natural or non-natural amino acid, and this range may     encompass 1 or 4 residues; see specification as filed for detailed  description of substitutions, R-groups and preferred emb
  c-term may be amidated
ILPXASSXXTEVSHXXXXHRKKHHGKRNSDRA

SEQ ID NO: 1466 - protein, 32 aa, Artificial Sequence
  Description of Artificial Sequence: Synthetic peptide
  MOD_RES (5)..(5): Any L- or D-natural amino acid and any non-natural amino acid; see  specification as filed for detail ed description of substitutions, R-groups  and preferred embodiments
  MOD_RES (8)..(9): Any L- or D-natural amino acid and any non-natural amino acid; see  specification as filed for detail ed description of substitutions, R-groups  and preferred embodiments
  MOD_RES (15)..(18): Any L- or D-natural or non-natural amino acid, and this range may     encompass 1 or 4 residues; see specification as filed for detailed  description of substitutions, R-groups and preferred emb
  c-term may be amidated
ILPIXSSXXTEVSHXXXXHRKKHHGKRNSDRA

SEQ ID NO: 1467 - protein, 32 aa, Artificial Sequence
  Description of Artificial Sequence: Synthetic peptide
  MOD_RES (6)..(6): Any L- or D-natural amino acid and any non-natural amino acid; see  specification as filed for detail ed description of substitutions, R-groups  and preferred embodiments
  MOD_RES (8)..(9): Any L- or D-natural amino acid and any non-natural amino acid; see  specification as filed for detail ed description of substitutions, R-groups  and preferred embodiments
  MOD_RES (15)..(18): Any L- or D-natural or non-natural amino acid, and this range may     encompass 1 or 4 residues; see specification as filed for detailed  description of substitutions, R-groups and preferred emb
  c-term may be amidated
ILPIAXSXXTEVSHXXXXHRKKHHGKRNSDRA

SEQ ID NO: 1468 - protein, 32 aa, Artificial Sequence
  Description of Artificial Sequence: Synthetic peptide
  MOD_RES (7)..(9): Any L- or D-natural amino acid and any non-natural amino acid; see  specification as filed for detail ed description of substitutions, R-groups  and preferred embodiments
  MOD_RES (15)..(18): Any L- or D-natural or non-natural amino acid, and this range may     encompass 1 or 4 residues; see specification as filed for detailed  description of substitutions, R-groups and preferred emb
  c-term may be amidated
ILPIASXXXTEVSHXXXXHRKKHHGKRNSDRA

SEQ ID NO: 1469 - protein, 32 aa, Artificial Sequence
  Description of Artificial Sequence: Synthetic peptide
  MOD_RES (1)..(1): Any L- or D-natural amino acid and any non-natural amino acid; see  specification as filed for detail ed description of substitutions, R-groups  and preferred embodiments
  MOD_RES (8)..(10): Any L- or D-natural amino acid and any non-natural amino acid; see  specification as filed for detail ed description of substitutions, R-groups  and preferred embodiments
  MOD_RES (15)..(18): Any L- or D-natural or non-natural amino acid, and this range may     encompass 1 or 4 residues; see specification as filed for detailed  description of substitutions, R-groups and preferred emb
  c-term may be amidated
XLPIASSXXXEVSHXXXXHRKKHHGKRNSDRA

SEQ ID NO: 1470 - protein, 32 aa, Artificial Sequence
  Description of Artificial Sequence: Synthetic peptide
  MOD_RES (2)..(2): Any L- or D-natural amino acid and any non-natural amino acid; see  specification as filed for detail ed description of substitutions, R-groups  and preferred embodiments
  MOD_RES (8)..(10): Any L- or D-natural amino acid and any non-natural amino acid; see  specification as filed for detail ed description of substitutions, R-groups  and preferred embodiments
  MOD_RES (15)..(18): Any L- or D-natural or non-natural amino acid, and this range may     encompass 1 or 4 residues; see specification as filed for detailed  description of substitutions, R-groups and preferred emb
  c-term may be amidated
IXPIASSXXXEVSHXXXXHRKKHHGKRNSDRA

SEQ ID NO: 1471 - protein, 32 aa, Artificial Sequence
  Description of Artificial Sequence: Synthetic peptide
  MOD_RES (3)..(3): Any L- or D-natural amino acid and any non-natural amino acid; see  specification as filed for detail ed description of substitutions, R-groups  and preferred embodiments
  MOD_RES (8)..(10): Any L- or D-natural amino acid and any non-natural amino acid; see  specification as filed for detail ed description of substitutions, R-groups  and preferred embodiments
  MOD_RES (15)..(18): Any L- or D-natural or non-natural amino acid, and this range may     encompass 1 or 4 residues; see specification as filed for detailed  description of substitutions, R-groups and preferred emb
  c-term may be amidated
ILXIASSXXXEVSHXXXXHRKKHHGKRNSDRA

SEQ ID NO: 1472 - protein, 32 aa, Artificial Sequence
  Description of Artificial Sequence: Synthetic peptide
  MOD_RES (4)..(4): Any L- or D-natural amino acid and any non-natural amino acid; see  specification as filed for detail ed description of substitutions, R-groups  and preferred embodiments
  MOD_RES (8)..(10): Any L- or D-natural amino acid and any non-natural amino acid; see  specification as filed for detail ed description of substitutions, R-groups  and preferred embodiments
  MOD_RES (15)..(18): Any L- or D-natural or non-natural amino acid, and this range may     encompass 1 or 4 residues; see specification as filed for detailed  description of substitutions, R-groups and preferred emb
  c-term may be amidated
ILPXASSXXXEVSHXXXXHRKKHHGKRNSDRA

SEQ ID NO: 1473 - protein, 32 aa, Artificial Sequence
  Description of Artificial Sequence: Synthetic peptide
  MOD_RES (5)..(5): Any L- or D-natural amino acid and any non-natural amino acid; see  specification as filed for detail ed description of substitutions, R-groups  and preferred embodiments
  MOD_RES (8)..(10): Any L- or D-natural amino acid and any non-natural amino acid; see  specification as filed for detail ed description of substitutions, R-groups  and preferred embodiments
  MOD_RES (15)..(18): Any L- or D-natural or non-natural amino acid, and this range may     encompass 1 or 4 residues; see specification as filed for detailed  description of substitutions, R-groups and preferred emb
  c-term may be amidated
ILPIXSSXXXEVSHXXXXHRKKHHGKRNSDRA

SEQ ID NO: 1474 - protein, 32 aa, Artificial Sequence
  Description of Artificial Sequence: Synthetic peptide
  MOD_RES (6)..(6): Any L- or D-natural amino acid and any non-natural amino acid; see  specification as filed for detail ed description of substitutions, R-groups  and preferred embodiments
  MOD_RES (8)..(10): Any L- or D-natural amino acid and any non-natural amino acid; see  specification as filed for detail ed description of substitutions, R-groups  and preferred embodiments
  MOD_RES (15)..(18): Any L- or D-natural or non-natural amino acid, and this range may     encompass 1 or 4 residues; see specification as filed for detailed  description of substitutions, R-groups and preferred emb
  c-term may be amidated
ILPIAXSXXXEVSHXXXXHRKKHHGKRNSDRA

SEQ ID NO: 1475 - protein, 32 aa, Artificial Sequence
  Description of Artificial Sequence: Synthetic peptide
  MOD_RES (7)..(10): Any L- or D-natural amino acid and any non-natural amino acid; see  specification as filed for detail ed description of substitutions, R-groups  and preferred embodiments
  MOD_RES (15)..(18): Any L- or D-natural or non-natural amino acid, and this range may     encompass 1 or 4 residues; see specification as filed for detailed  description of substitutions, R-groups and preferred emb
  c-term may be amidated
ILPIASXXXXEVSHXXXXHRKKHHGKRNSDRA

SEQ ID NO: 1476 - protein, 32 aa, Artificial Sequence
  Description of Artificial Sequence: Synthetic peptide
  MOD_RES (1)..(1): Any L- or D-natural amino acid and any non-natural amino acid; see  specification as filed for detail ed description of substitutions, R-groups  and preferred embodiments
  MOD_RES (8)..(9): Any L- or D-natural amino acid and any non-natural amino acid; see  specification as filed for detail ed description of substitutions, R-groups  and preferred embodiments
  MOD_RES (11)..(11): Any L- or D-natural amino acid and any non-natural amino acid; see  specification as filed for detail ed description of substitutions, R-groups  and preferred embodiments
  MOD_RES (15)..(18): Any L- or D-natural or non-natural amino acid, and this range may     encompass 1 or 4 residues; see specification as filed for detailed  description of substitutions, R-groups and preferred emb
  c-term may be amidated
XLPIASSXXTXVSHXXXXHRKKHHGKRNSDRA

SEQ ID NO: 1477 - protein, 32 aa, Artificial Sequence
  Description of Artificial Sequence: Synthetic peptide
  MOD_RES (2)..(2): Any L- or D-natural amino acid and any non-natural amino acid; see  specification as filed for detail ed description of substitutions, R-groups  and preferred embodiments
  MOD_RES (8)..(9): Any L- or D-natural amino acid and any non-natural amino acid; see  specification as filed for detail ed description of substitutions, R-groups  and preferred embodiments
  MOD_RES (11)..(11): Any L- or D-natural amino acid and any non-natural amino acid; see  specification as filed for detail ed description of substitutions, R-groups  and preferred embodiments
  MOD_RES (15)..(18): Any L- or D-natural or non-natural amino acid, and this range may     encompass 1 or 4 residues; see specification as filed for detailed  description of substitutions, R-groups and preferred emb
  c-term may be amidated
IXPIASSXXTXVSHXXXXHRKKHHGKRNSDRA

SEQ ID NO: 1478 - protein, 32 aa, Artificial Sequence
  Description of Artificial Sequence: Synthetic peptide
  MOD_RES (3)..(3): Any L- or D-natural amino acid and any non-natural amino acid; see  specification as filed for detail ed description of substitutions, R-groups  and preferred embodiments
  MOD_RES (8)..(9): Any L- or D-natural amino acid and any non-natural amino acid; see  specification as filed for detail ed description of substitutions, R-groups  and preferred embodiments
  MOD_RES (11)..(11): Any L- or D-natural amino acid and any non-natural amino acid; see  specification as filed for detail ed description of substitutions, R-groups  and preferred embodiments
  MOD_RES (15)..(18): Any L- or D-natural or non-natural amino acid, and this range may     encompass 1 or 4 residues; see specification as filed for detailed  description of substitutions, R-groups and preferred emb
  c-term may be amidated
ILXIASSXXTXVSHXXXXHRKKHHGKRNSDRA

SEQ ID NO: 1479 - protein, 32 aa, Artificial Sequence
  Description of Artificial Sequence: Synthetic peptide
  MOD_RES (4)..(4): Any L- or D-natural amino acid and any non-natural amino acid; see  specification as filed for detail ed description of substitutions, R-groups  and preferred embodiments
  MOD_RES (8)..(9): Any L- or D-natural amino acid and any non-natural amino acid; see  specification as filed for detail ed description of substitutions, R-groups  and preferred embodiments
  MOD_RES (11)..(11): Any L- or D-natural amino acid and any non-natural amino acid; see  specification as filed for detail ed description of substitutions, R-groups  and preferred embodiments
  MOD_RES (15)..(18): Any L- or D-natural or non-natural amino acid, and this range may     encompass 1 or 4 residues; see specification as filed for detailed  description of substitutions, R-groups and preferred emb
  c-term may be amidated
ILPXASSXXTXVSHXXXXHRKKHHGKRNSDRA

SEQ ID NO: 1480 - protein, 32 aa, Artificial Sequence
  Description of Artificial Sequence: Synthetic peptide
  MOD_RES (5)..(5): Any L- or D-natural amino acid and any non-natural amino acid; see  specification as filed for detail ed description of substitutions, R-groups  and preferred embodiments
  MOD_RES (8)..(9): Any L- or D-natural amino acid and any non-natural amino acid; see  specification as filed for detail ed description of substitutions, R-groups  and preferred embodiments
  MOD_RES (11)..(11): Any L- or D-natural amino acid and any non-natural amino acid; see  specification as filed for detail ed description of substitutions, R-groups  and preferred embodiments
  MOD_RES (15)..(18): Any L- or D-natural or non-natural amino acid, and this range may     encompass 1 or 4 residues; see specification as filed for detailed  description of substitutions, R-groups and preferred emb
  c-term may be amidated
ILPIXSSXXTXVSHXXXXHRKKHHGKRNSDRA

SEQ ID NO: 1481 - protein, 32 aa, Artificial Sequence
  Description of Artificial Sequence: Synthetic peptide
  MOD_RES (6)..(6): Any L- or D-natural amino acid and any non-natural amino acid; see  specification as filed for detail ed description of substitutions, R-groups  and preferred embodiments
  MOD_RES (8)..(9): Any L- or D-natural amino acid and any non-natural amino acid; see  specification as filed for detail ed description of substitutions, R-groups  and preferred embodiments
  MOD_RES (11)..(11): Any L- or D-natural amino acid and any non-natural amino acid; see  specification as filed for detail ed description of substitutions, R-groups  and preferred embodiments
  MOD_RES (15)..(18): Any L- or D-natural or non-natural amino acid, and this range may     encompass 1 or 4 residues; see specification as filed for detailed  description of substitutions, R-groups and preferred emb
  c-term may be amidated
ILPIAXSXXTXVSHXXXXHRKKHHGKRNSDRA

SEQ ID NO: 1482 - protein, 32 aa, Artificial Sequence
  Description of Artificial Sequence: Synthetic peptide
  MOD_RES (7)..(9): Any L- or D-natural amino acid and any non-natural amino acid; see  specification as filed for detail ed description of substitutions, R-groups  and preferred embodiments
  MOD_RES (11)..(11): Any L- or D-natural amino acid and any non-natural amino acid; see  specification as filed for detail ed description of substitutions, R-groups  and preferred embodiments
  MOD_RES (15)..(18): Any L- or D-natural or non-natural amino acid, and this range may     encompass 1 or 4 residues; see specification as filed for detailed  description of substitutions, R-groups and preferred emb
  c-term may be amidated
ILPIASXXXTXVSHXXXXHRKKHHGKRNSDRA

SEQ ID NO: 1483 - protein, 32 aa, Artificial Sequence
  Description of Artificial Sequence: Synthetic peptide
  MOD_RES (1)..(1): Any L- or D-natural amino acid and any non-natural amino acid; see  specification as filed for detail ed description of substitutions, R-groups  and preferred embodiments
  MOD_RES (8)..(9): Any L- or D-natural amino acid and any non-natural amino acid; see  specification as filed for detail ed description of substitutions, R-groups  and preferred embodiments
  MOD_RES (12)..(12): Any L- or D-natural amino acid and any non-natural amino acid; see  specification as filed for detail ed description of substitutions, R-groups  and preferred embodiments
  MOD_RES (15)..(18): Any L- or D-natural or non-natural amino acid, and this range may     encompass 1 or 4 residues; see specification as filed for detailed  description of substitutions, R-groups and preferred emb
  c-term may be amidated
XLPIASSXXTEXSHXXXXHRKKHHGKRNSDRA

SEQ ID NO: 1484 - protein, 32 aa, Artificial Sequence
  Description of Artificial Sequence: Synthetic peptide
  MOD_RES (2)..(2): Any L- or D-natural amino acid and any non-natural amino acid; see  specification as filed for detail ed description of substitutions, R-groups  and preferred embodiments
  MOD_RES (8)..(9): Any L- or D-natural amino acid and any non-natural amino acid; see  specification as filed for detail ed description of substitutions, R-groups  and preferred embodiments
  MOD_RES (12)..(12): Any L- or D-natural amino acid and any non-natural amino acid; see  specification as filed for detail ed description of substitutions, R-groups  and preferred embodiments
  MOD_RES (15)..(18): Any L- or D-natural or non-natural amino acid, and this range may     encompass 1 or 4 residues; see specification as filed for detailed  description of substitutions, R-groups and preferred emb
  c-term may be amidated
IXPIASSXXTEXSHXXXXHRKKHHGKRNSDRA

SEQ ID NO: 1485 - protein, 32 aa, Artificial Sequence
  Description of Artificial Sequence: Synthetic peptide
  MOD_RES (3)..(3): Any L- or D-natural amino acid and any non-natural amino acid; see  specification as filed for detail ed description of substitutions, R-groups  and preferred embodiments
  MOD_RES (8)..(9): Any L- or D-natural amino acid and any non-natural amino acid; see  specification as filed for detail ed description of substitutions, R-groups  and preferred embodiments
  MOD_RES (12)..(12): Any L- or D-natural amino acid and any non-natural amino acid; see  specification as filed for detail ed description of substitutions, R-groups  and preferred embodiments
  MOD_RES (15)..(18): Any L- or D-natural or non-natural amino acid, and this range may     encompass 1 or 4 residues; see specification as filed for detailed  description of substitutions, R-groups and preferred emb
  c-term may be amidated
ILXIASSXXTEXSHXXXXHRKKHHGKRNSDRA

SEQ ID NO: 1486 - protein, 32 aa, Artificial Sequence
  Description of Artificial Sequence: Synthetic peptide
  MOD_RES (4)..(4): Any L- or D-natural amino acid and any non-natural amino acid; see  specification as filed for detail ed description of substitutions, R-groups  and preferred embodiments
  MOD_RES (8)..(9): Any L- or D-natural amino acid and any non-natural amino acid; see  specification as filed for detail ed description of substitutions, R-groups  and preferred embodiments
  MOD_RES (12)..(12): Any L- or D-natural amino acid and any non-natural amino acid; see  specification as filed for detail ed description of substitutions, R-groups  and preferred embodiments
  MOD_RES (15)..(18): Any L- or D-natural or non-natural amino acid, and this range may     encompass 1 or 4 residues; see specification as filed for detailed  description of substitutions, R-groups and preferred emb
  c-term may be amidated
ILPXASSXXTEXSHXXXXHRKKHHGKRNSDRA

SEQ ID NO: 1487 - protein, 32 aa, Artificial Sequence
  Description of Artificial Sequence: Synthetic peptide
  MOD_RES (5)..(5): Any L- or D-natural amino acid and any non-natural amino acid; see  specification as filed for detail ed description of substitutions, R-groups  and preferred embodiments
  MOD_RES (8)..(9): Any L- or D-natural amino acid and any non-natural amino acid; see  specification as filed for detail ed description of substitutions, R-groups  and preferred embodiments
  MOD_RES (12)..(12): Any L- or D-natural amino acid and any non-natural amino acid; see  specification as filed for detail ed description of substitutions, R-groups  and preferred embodiments
  MOD_RES (15)..(18): Any L- or D-natural or non-natural amino acid, and this range may     encompass 1 or 4 residues; see specification as filed for detailed  description of substitutions, R-groups and preferred emb
  c-term may be amidated
ILPIXSSXXTEXSHXXXXHRKKHHGKRNSDRA

SEQ ID NO: 1488 - protein, 32 aa, Artificial Sequence
  Description of Artificial Sequence: Synthetic peptide
  MOD_RES (6)..(6): Any L- or D-natural amino acid and any non-natural amino acid; see  specification as filed for detail ed description of substitutions, R-groups  and preferred embodiments
  MOD_RES (8)..(9): Any L- or D-natural amino acid and any non-natural amino acid; see  specification as filed for detail ed description of substitutions, R-groups  and preferred embodiments
  MOD_RES (12)..(12): Any L- or D-natural amino acid and any non-natural amino acid; see  specification as filed for detail ed description of substitutions, R-groups  and preferred embodiments
  MOD_RES (15)..(18): Any L- or D-natural or non-natural amino acid, and this range may     encompass 1 or 4 residues; see specification as filed for detailed  description of substitutions, R-groups and preferred emb
  c-term may be amidated
ILPIAXSXXTEXSHXXXXHRKKHHGKRNSDRA

SEQ ID NO: 1489 - protein, 32 aa, Artificial Sequence
  Description of Artificial Sequence: Synthetic peptide
  MOD_RES (7)..(9): Any L- or D-natural amino acid and any non-natural amino acid; see  specification as filed for detail ed description of substitutions, R-groups  and preferred embodiments
  MOD_RES (12)..(12): Any L- or D-natural amino acid and any non-natural amino acid; see  specification as filed for detail ed description of substitutions, R-groups  and preferred embodiments
  MOD_RES (15)..(18): Any L- or D-natural or non-natural amino acid, and this range may     encompass 1 or 4 residues; see specification as filed for detailed  description of substitutions, R-groups and preferred emb
  c-term may be amidated
ILPIASXXXTEXSHXXXXHRKKHHGKRNSDRA

SEQ ID NO: 1490 - protein, 32 aa, Artificial Sequence
  Description of Artificial Sequence: Synthetic peptide
  MOD_RES (1)..(1): Any L- or D-natural amino acid and any non-natural amino acid; see  specification as filed for detail ed description of substitutions, R-groups  and preferred embodiments
  MOD_RES (8)..(9): Any L- or D-natural amino acid and any non-natural amino acid; see  specification as filed for detail ed description of substitutions, R-groups  and preferred embodiments
  MOD_RES (13)..(13): Any L- or D-natural amino acid and any non-natural amino acid; see  specification as filed for detail ed description of substitutions, R-groups  and preferred embodiments
  MOD_RES (15)..(18): Any L- or D-natural or non-natural amino acid, and this range may     encompass 1 or 4 residues; see specification as filed for detailed  description of substitutions, R-groups and preferred emb
  c-term may be amidated
XLPIASSXXTEVXHXXXXHRKKHHGKRNSDRA

SEQ ID NO: 1491 - protein, 32 aa, Artificial Sequence
  Description of Artificial Sequence: Synthetic peptide
  MOD_RES (2)..(2): Any L- or D-natural amino acid and any non-natural amino acid; see  specification as filed for detail ed description of substitutions, R-groups  and preferred embodiments
  MOD_RES (8)..(9): Any L- or D-natural amino acid and any non-natural amino acid; see  specification as filed for detail ed description of substitutions, R-groups  and preferred embodiments
  MOD_RES (13)..(13): Any L- or D-natural amino acid and any non-natural amino acid; see  specification as filed for detail ed description of substitutions, R-groups  and preferred embodiments
  MOD_RES (15)..(18): Any L- or D-natural or non-natural amino acid, and this range may     encompass 1 or 4 residues; see specification as filed for detailed  description of substitutions, R-groups and preferred emb
  c-term may be amidated
IXPIASSXXTEVXHXXXXHRKKHHGKRNSDRA

SEQ ID NO: 1492 - protein, 32 aa, Artificial Sequence
  Description of Artificial Sequence: Synthetic peptide
  MOD_RES (3)..(3): Any L- or D-natural amino acid and any non-natural amino acid; see  specification as filed for detail ed description of substitutions, R-groups  and preferred embodiments
  MOD_RES (8)..(9): Any L- or D-natural amino acid and any non-natural amino acid; see  specification as filed for detail ed description of substitutions, R-groups  and preferred embodiments
  MOD_RES (13)..(13): Any L- or D-natural amino acid and any non-natural amino acid; see  specification as filed for detail ed description of substitutions, R-groups  and preferred embodiments
  MOD_RES (15)..(18): Any L- or D-natural or non-natural amino acid, and this range may     encompass 1 or 4 residues; see specification as filed for detailed  description of substitutions, R-groups and preferred emb
  c-term may be amidated
ILXIASSXXTEVXHXXXXHRKKHHGKRNSDRA

SEQ ID NO: 1493 - protein, 32 aa, Artificial Sequence
  Description of Artificial Sequence: Synthetic peptide
  MOD_RES (4)..(4): Any L- or D-natural amino acid and any non-natural amino acid; see  specification as filed for detail ed description of substitutions, R-groups  and preferred embodiments
  MOD_RES (8)..(9): Any L- or D-natural amino acid and any non-natural amino acid; see  specification as filed for detail ed description of substitutions, R-groups  and preferred embodiments
  MOD_RES (13)..(13): Any L- or D-natural amino acid and any non-natural amino acid; see  specification as filed for detail ed description of substitutions, R-groups  and preferred embodiments
  MOD_RES (15)..(18): Any L- or D-natural or non-natural amino acid, and this range may     encompass 1 or 4 residues; see specification as filed for detailed  description of substitutions, R-groups and preferred emb
  c-term may be amidated
ILPXASSXXTEVXHXXXXHRKKHHGKRNSDRA

SEQ ID NO: 1494 - protein, 32 aa, Artificial Sequence
  Description of Artificial Sequence: Synthetic peptide
  MOD_RES (5)..(5): Any L- or D-natural amino acid and any non-natural amino acid; see  specification as filed for detail ed description of substitutions, R-groups  and preferred embodiments
  MOD_RES (8)..(9): Any L- or D-natural amino acid and any non-natural amino acid; see  specification as filed for detail ed description of substitutions, R-groups  and preferred embodiments
  MOD_RES (13)..(13): Any L- or D-natural amino acid and any non-natural amino acid; see  specification as filed for detail ed description of substitutions, R-groups  and preferred embodiments
  MOD_RES (15)..(18): Any L- or D-natural or non-natural amino acid, and this range may     encompass 1 or 4 residues; see specification as filed for detailed  description of substitutions, R-groups and preferred emb
  c-term may be amidated
ILPIXSSXXTEVXHXXXXHRKKHHGKRNSDRA

SEQ ID NO: 1495 - protein, 32 aa, Artificial Sequence
  Description of Artificial Sequence: Synthetic peptide
  MOD_RES (6)..(6): Any L- or D-natural amino acid and any non-natural amino acid; see  specification as filed for detail ed description of substitutions, R-groups  and preferred embodiments
  MOD_RES (8)..(9): Any L- or D-natural amino acid and any non-natural amino acid; see  specification as filed for detail ed description of substitutions, R-groups  and preferred embodiments
  MOD_RES (13)..(13): Any L- or D-natural amino acid and any non-natural amino acid; see  specification as filed for detail ed description of substitutions, R-groups  and preferred embodiments
  MOD_RES (15)..(18): Any L- or D-natural or non-natural amino acid, and this range may     encompass 1 or 4 residues; see specification as filed for detailed  description of substitutions, R-groups and preferred emb
  c-term may be amidated
ILPIAXSXXTEVXHXXXXHRKKHHGKRNSDRA

SEQ ID NO: 1496 - protein, 32 aa, Artificial Sequence
  Description of Artificial Sequence: Synthetic peptide
  MOD_RES (7)..(9): Any L- or D-natural amino acid and any non-natural amino acid; see  specification as filed for detail ed description of substitutions, R-groups  and preferred embodiments
  MOD_RES (13)..(13): Any L- or D-natural amino acid and any non-natural amino acid; see  specification as filed for detail ed description of substitutions, R-groups  and preferred embodiments
  MOD_RES (15)..(18): Any L- or D-natural or non-natural amino acid, and this range may     encompass 1 or 4 residues; see specification as filed for detailed  description of substitutions, R-groups and preferred emb
  c-term may be amidated
ILPIASXXXTEVXHXXXXHRKKHHGKRNSDRA

SEQ ID NO: 1497 - protein, 32 aa, Artificial Sequence
  Description of Artificial Sequence: Synthetic peptide
  MOD_RES (1)..(1): Any L- or D-natural amino acid and any non-natural amino acid; see  specification as filed for detail ed description of substitutions, R-groups  and preferred embodiments
  MOD_RES (8)..(9): Any L- or D-natural amino acid and any non-natural amino acid; see  specification as filed for detail ed description of substitutions, R-groups  and preferred embodiments
  MOD_RES (14)..(14): Any L- or D-natural amino acid and any non-natural amino acid; see  specification as filed for detail ed description of substitutions, R-groups  and preferred embodiments
  MOD_RES (15)..(18): Any L- or D-natural or non-natural amino acid, and this range may     encompass 1 or 4 residues; see specification as filed for detailed  description of substitutions, R-groups and preferred emb
  c-term may be amidated
XLPIASSXXTEVSXXXXXHRKKHHGKRNSDRA

SEQ ID NO: 1498 - protein, 32 aa, Artificial Sequence
  Description of Artificial Sequence: Synthetic peptide
  MOD_RES (2)..(2): Any L- or D-natural amino acid and any non-natural amino acid; see  specification as filed for detail ed description of substitutions, R-groups  and preferred embodiments
  MOD_RES (8)..(9): Any L- or D-natural amino acid and any non-natural amino acid; see  specification as filed for detail ed description of substitutions, R-groups  and preferred embodiments
  MOD_RES (14)..(14): Any L- or D-natural amino acid and any non-natural amino acid; see  specification as filed for detail ed description of substitutions, R-groups  and preferred embodiments
  MOD_RES (15)..(18): Any L- or D-natural or non-natural amino acid, and this range may     encompass 1 or 4 residues; see specification as filed for detailed  description of substitutions, R-groups and preferred emb
  c-term may be amidated
IXPIASSXXTEVSXXXXXHRKKHHGKRNSDRA

SEQ ID NO: 1499 - protein, 32 aa, Artificial Sequence
  Description of Artificial Sequence: Synthetic peptide
  MOD_RES (3)..(3): Any L- or D-natural amino acid and any non-natural amino acid; see  specification as filed for detail ed description of substitutions, R-groups  and preferred embodiments
  MOD_RES (8)..(9): Any L- or D-natural amino acid and any non-natural amino acid; see  specification as filed for detail ed description of substitutions, R-groups  and preferred embodiments
  MOD_RES (14)..(14): Any L- or D-natural amino acid and any non-natural amino acid; see  specification as filed for detail ed description of substitutions, R-groups  and preferred embodiments
  MOD_RES (15)..(18): Any L- or D-natural or non-natural amino acid, and this range may     encompass 1 or 4 residues; see specification as filed for detailed  description of substitutions, R-groups and preferred emb
  c-term may be amidated
ILXIASSXXTEVSXXXXXHRKKHHGKRNSDRA

SEQ ID NO: 1500 - protein, 32 aa, Artificial Sequence
  Description of Artificial Sequence: Synthetic peptide
  MOD_RES (4)..(4): Any L- or D-natural amino acid and any non-natural amino acid; see  specification as filed for detail ed description of substitutions, R-groups  and preferred embodiments
  MOD_RES (8)..(9): Any L- or D-natural amino acid and any non-natural amino acid; see  specification as filed for detail ed description of substitutions, R-groups  and preferred embodiments
  MOD_RES (14)..(14): Any L- or D-natural amino acid and any non-natural amino acid; see  specification as filed for detail ed description of substitutions, R-groups  and preferred embodiments
  MOD_RES (15)..(18): Any L- or D-natural or non-natural amino acid, and this range may     encompass 1 or 4 residues; see specification as filed for detailed  description of substitutions, R-groups and preferred emb
  c-term may be amidated
ILPXASSXXTEVSXXXXXHRKKHHGKRNSDRA

SEQ ID NO: 1501 - protein, 32 aa, Artificial Sequence
  Description of Artificial Sequence: Synthetic peptide
  MOD_RES (5)..(5): Any L- or D-natural amino acid and any non-natural amino acid; see  specification as filed for detail ed description of substitutions, R-groups  and preferred embodiments
  MOD_RES (8)..(9): Any L- or D-natural amino acid and any non-natural amino acid; see  specification as filed for detail ed description of substitutions, R-groups  and preferred embodiments
  MOD_RES (14)..(14): Any L- or D-natural amino acid and any non-natural amino acid; see  specification as filed for detail ed description of substitutions, R-groups  and preferred embodiments
  MOD_RES (15)..(18): Any L- or D-natural or non-natural amino acid, and this range may     encompass 1 or 4 residues; see specification as filed for detailed  description of substitutions, R-groups and preferred emb
  c-term may be amidated
ILPIXSSXXTEVSXXXXXHRKKHHGKRNSDRA

SEQ ID NO: 1502 - protein, 32 aa, Artificial Sequence
  Description of Artificial Sequence: Synthetic peptide
  MOD_RES (6)..(6): Any L- or D-natural amino acid and any non-natural amino acid; see  specification as filed for detail ed description of substitutions, R-groups  and preferred embodiments
  MOD_RES (8)..(9): Any L- or D-natural amino acid and any non-natural amino acid; see  specification as filed for detail ed description of substitutions, R-groups  and preferred embodiments
  MOD_RES (14)..(14): Any L- or D-natural amino acid and any non-natural amino acid; see  specification as filed for detail ed description of substitutions, R-groups  and preferred embodiments
  MOD_RES (15)..(18): Any L- or D-natural or non-natural amino acid, and this range may     encompass 1 or 4 residues; see specification as filed for detailed  description of substitutions, R-groups and preferred emb
  c-term may be amidated
ILPIAXSXXTEVSXXXXXHRKKHHGKRNSDRA

SEQ ID NO: 1503 - protein, 32 aa, Artificial Sequence
  Description of Artificial Sequence: Synthetic peptide
  MOD_RES (7)..(9): Any L- or D-natural amino acid and any non-natural amino acid; see  specification as filed for detail ed description of substitutions, R-groups  and preferred embodiments
  MOD_RES (14)..(14): Any L- or D-natural amino acid and any non-natural amino acid; see  specification as filed for detail ed description of substitutions, R-groups  and preferred embodiments
  MOD_RES (15)..(18): Any L- or D-natural or non-natural amino acid, and this range may     encompass 1 or 4 residues; see specification as filed for detailed  description of substitutions, R-groups and preferred emb
  c-term may be amidated
ILPIASXXXTEVSXXXXXHRKKHHGKRNSDRA

SEQ ID NO: 1504 - protein, 33 aa, Artificial Sequence
  Description of Artificial Sequence: Synthetic peptide
  MOD_RES (1)..(1): Any L- or D-natural amino acid and any non-natural amino acid; see  specification as filed for detail ed description of substitutions, R-groups  and preferred embodiments
  MOD_RES (8)..(9): Any L- or D-natural amino acid and any non-natural amino acid; see  specification as filed for detail ed description of substitutions, R-groups  and preferred embodiments
  MOD_RES (15)..(18): Any L- or D-natural or non-natural amino acid, and this range may     encompass 1 or 4 residues; see specification as filed for detailed  description of substitutions, R-groups and preferred emb
  c-term may be amidated
XLPIASSXXTEVSHXXXXAHQGKHETYGHKTPY

SEQ ID NO: 1505 - protein, 33 aa, Artificial Sequence
  Description of Artificial Sequence: Synthetic peptide
  MOD_RES (2)..(2): Any L- or D-natural amino acid and any non-natural amino acid; see  specification as filed for detail ed description of substitutions, R-groups  and preferred embodiments
  MOD_RES (8)..(9): Any L- or D-natural amino acid and any non-natural amino acid; see  specification as filed for detail ed description of substitutions, R-groups  and preferred embodiments
  MOD_RES (15)..(18): Any L- or D-natural or non-natural amino acid, and this range may     encompass 1 or 4 residues; see specification as filed for detailed  description of substitutions, R-groups and preferred emb
  c-term may be amidated
IXPIASSXXTEVSHXXXXAHQGKHETYGHKTPY

SEQ ID NO: 1506 - protein, 33 aa, Artificial Sequence
  Description of Artificial Sequence: Synthetic peptide
  MOD_RES (3)..(3): Any L- or D-natural amino acid and any non-natural amino acid; see  specification as filed for detail ed description of substitutions, R-groups  and preferred embodiments
  MOD_RES (8)..(9): Any L- or D-natural amino acid and any non-natural amino acid; see  specification as filed for detail ed description of substitutions, R-groups  and preferred embodiments
  MOD_RES (15)..(18): Any L- or D-natural or non-natural amino acid, and this range may     encompass 1 or 4 residues; see specification as filed for detailed  description of substitutions, R-groups and preferred emb
  c-term may be amidated
ILXIASSXXTEVSHXXXXAHQGKHETYGHKTPY

SEQ ID NO: 1507 - protein, 33 aa, Artificial Sequence
  Description of Artificial Sequence: Synthetic peptide
  MOD_RES (4)..(4): Any L- or D-natural amino acid and any non-natural amino acid; see  specification as filed for detail ed description of substitutions, R-groups  and preferred embodiments
  MOD_RES (8)..(9): Any L- or D-natural amino acid and any non-natural amino acid; see  specification as filed for detail ed description of substitutions, R-groups  and preferred embodiments
  MOD_RES (15)..(18): Any L- or D-natural or non-natural amino acid, and this range may     encompass 1 or 4 residues; see specification as filed for detailed  description of substitutions, R-groups and preferred emb
  c-term may be amidated
ILPXASSXXTEVSHXXXXAHQGKHETYGHKTPY

SEQ ID NO: 1508 - protein, 33 aa, Artificial Sequence
  Description of Artificial Sequence: Synthetic peptide
  MOD_RES (5)..(5): Any L- or D-natural amino acid and any non-natural amino acid; see  specification as filed for detail ed description of substitutions, R-groups  and preferred embodiments
  MOD_RES (8)..(9): Any L- or D-natural amino acid and any non-natural amino acid; see  specification as filed for detail ed description of substitutions, R-groups  and preferred embodiments
  MOD_RES (15)..(18): Any L- or D-natural or non-natural amino acid, and this range may     encompass 1 or 4 residues; see specification as filed for detailed  description of substitutions, R-groups and preferred emb
  c-term may be amidated
ILPIXSSXXTEVSHXXXXAHQGKHETYGHKTPY

SEQ ID NO: 1509 - protein, 33 aa, Artificial Sequence
  Description of Artificial Sequence: Synthetic peptide
  MOD_RES (6)..(6): Any L- or D-natural amino acid and any non-natural amino acid; see  specification as filed for detail ed description of substitutions, R-groups  and preferred embodiments
  MOD_RES (8)..(9): Any L- or D-natural amino acid and any non-natural amino acid; see  specification as filed for detail ed description of substitutions, R-groups  and preferred embodiments
  MOD_RES (15)..(18): Any L- or D-natural or non-natural amino acid, and this range may     encompass 1 or 4 residues; see specification as filed for detailed  description of substitutions, R-groups and preferred emb
  c-term may be amidated
ILPIAXSXXTEVSHXXXXAHQGKHETYGHKTPY

SEQ ID NO: 1510 - protein, 33 aa, Artificial Sequence
  Description of Artificial Sequence: Synthetic peptide
  MOD_RES (7)..(9): Any L- or D-natural amino acid and any non-natural amino acid; see  specification as filed for detail ed description of substitutions, R-groups  and preferred embodiments
  MOD_RES (15)..(18): Any L- or D-natural or non-natural amino acid, and this range may     encompass 1 or 4 residues; see specification as filed for detailed  description of substitutions, R-groups and preferred emb
  c-term may be amidated
ILPIASXXXTEVSHXXXXAHQGKHETYGHKTPY

SEQ ID NO: 1511 - protein, 33 aa, Artificial Sequence
  Description of Artificial Sequence: Synthetic peptide
  MOD_RES (1)..(1): Any L- or D-natural amino acid and any non-natural amino acid; see  specification as filed for detail ed description of substitutions, R-groups  and preferred embodiments
  MOD_RES (8)..(10): Any L- or D-natural amino acid and any non-natural amino acid; see  specification as filed for detail ed description of substitutions, R-groups  and preferred embodiments
  MOD_RES (15)..(18): Any L- or D-natural or non-natural amino acid, and this range may     encompass 1 or 4 residues; see specification as filed for detailed  description of substitutions, R-groups and preferred emb
  c-term may be amidated
XLPIASSXXXEVSHXXXXAHQGKHETYGHKTPY

SEQ ID NO: 1512 - protein, 33 aa, Artificial Sequence
  Description of Artificial Sequence: Synthetic peptide
  MOD_RES (2)..(2): Any L- or D-natural amino acid and any non-natural amino acid; see  specification as filed for detail ed description of substitutions, R-groups  and preferred embodiments
  MOD_RES (8)..(10): Any L- or D-natural amino acid and any non-natural amino acid; see  specification as filed for detail ed description of substitutions, R-groups  and preferred embodiments
  MOD_RES (15)..(18): Any L- or D-natural or non-natural amino acid, and this range may     encompass 1 or 4 residues; see specification as filed for detailed  description of substitutions, R-groups and preferred emb
  c-term may be amidated
IXPIASSXXXEVSHXXXXAHQGKHETYGHKTPY

SEQ ID NO: 1513 - protein, 33 aa, Artificial Sequence
  Description of Artificial Sequence: Synthetic peptide
  MOD_RES (3)..(3): Any L- or D-natural amino acid and any non-natural amino acid; see  specification as filed for detail ed description of substitutions, R-groups  and preferred embodiments
  MOD_RES (8)..(10): Any L- or D-natural amino acid and any non-natural amino acid; see  specification as filed for detail ed description of substitutions, R-groups  and preferred embodiments
  MOD_RES (15)..(18): Any L- or D-natural or non-natural amino acid, and this range may     encompass 1 or 4 residues; see specification as filed for detailed  description of substitutions, R-groups and preferred emb
  c-term may be amidated
ILXIASSXXXEVSHXXXXAHQGKHETYGHKTPY

SEQ ID NO: 1514 - protein, 33 aa, Artificial Sequence
  Description of Artificial Sequence: Synthetic peptide
  MOD_RES (4)..(4): Any L- or D-natural amino acid and any non-natural amino acid; see  specification as filed for detail ed description of substitutions, R-groups  and preferred embodiments
  MOD_RES (8)..(10): Any L- or D-natural amino acid and any non-natural amino acid; see  specification as filed for detail ed description of substitutions, R-groups  and preferred embodiments
  MOD_RES (15)..(18): Any L- or D-natural or non-natural amino acid, and this range may     encompass 1 or 4 residues; see specification as filed for detailed  description of substitutions, R-groups and preferred emb
  c-term may be amidated
ILPXASSXXXEVSHXXXXAHQGKHETYGHKTPY

SEQ ID NO: 1515 - protein, 33 aa, Artificial Sequence
  Description of Artificial Sequence: Synthetic peptide
  MOD_RES (5)..(5): Any L- or D-natural amino acid and any non-natural amino acid; see  specification as filed for detail ed description of substitutions, R-groups  and preferred embodiments
  MOD_RES (8)..(10): Any L- or D-natural amino acid and any non-natural amino acid; see  specification as filed for detail ed description of substitutions, R-groups  and preferred embodiments
  MOD_RES (15)..(18): Any L- or D-natural or non-natural amino acid, and this range may     encompass 1 or 4 residues; see specification as filed for detailed  description of substitutions, R-groups and preferred emb
  c-term may be amidated
ILPIXSSXXXEVSHXXXXAHQGKHETYGHKTPY

SEQ ID NO: 1516 - protein, 33 aa, Artificial Sequence
  Description of Artificial Sequence: Synthetic peptide
  MOD_RES (6)..(6): Any L- or D-natural amino acid and any non-natural amino acid; see  specification as filed for detail ed description of substitutions, R-groups  and preferred embodiments
  MOD_RES (8)..(10): Any L- or D-natural amino acid and any non-natural amino acid; see  specification as filed for detail ed description of substitutions, R-groups  and preferred embodiments
  MOD_RES (15)..(18): Any L- or D-natural or non-natural amino acid, and this range may     encompass 1 or 4 residues; see specification as filed for detailed  description of substitutions, R-groups and preferred emb
  c-term may be amidated
ILPIAXSXXXEVSHXXXXAHQGKHETYGHKTPY

SEQ ID NO: 1517 - protein, 33 aa, Artificial Sequence
  Description of Artificial Sequence: Synthetic peptide
  MOD_RES (7)..(10): Any L- or D-natural amino acid and any non-natural amino acid; see  specification as filed for detail ed description of substitutions, R-groups  and preferred embodiments
  MOD_RES (15)..(18): Any L- or D-natural or non-natural amino acid, and this range may     encompass 1 or 4 residues; see specification as filed for detailed  description of substitutions, R-groups and preferred emb
  c-term may be amidated
ILPIASXXXXEVSHXXXXAHQGKHETYGHKTPY

SEQ ID NO: 1518 - protein, 33 aa, Artificial Sequence
  Description of Artificial Sequence: Synthetic peptide
  MOD_RES (1)..(1): Any L- or D-natural amino acid and any non-natural amino acid; see  specification as filed for detail ed description of substitutions, R-groups  and preferred embodiments
  MOD_RES (8)..(9): Any L- or D-natural amino acid and any non-natural amino acid; see  specification as filed for detail ed description of substitutions, R-groups  and preferred embodiments
  MOD_RES (11)..(11): Any L- or D-natural amino acid and any non-natural amino acid; see  specification as filed for detail ed description of substitutions, R-groups  and preferred embodiments
  MOD_RES (15)..(18): Any L- or D-natural or non-natural amino acid, and this range may     encompass 1 or 4 residues; see specification as filed for detailed  description of substitutions, R-groups and preferred emb
  c-term may be amidated
XLPIASSXXTXVSHXXXXAHQGKHETYGHKTPY

SEQ ID NO: 1519 - protein, 33 aa, Artificial Sequence
  Description of Artificial Sequence: Synthetic peptide
  MOD_RES (2)..(2): Any L- or D-natural amino acid and any non-natural amino acid; see  specification as filed for detail ed description of substitutions, R-groups  and preferred embodiments
  MOD_RES (8)..(9): Any L- or D-natural amino acid and any non-natural amino acid; see  specification as filed for detail ed description of substitutions, R-groups  and preferred embodiments
  MOD_RES (11)..(11): Any L- or D-natural amino acid and any non-natural amino acid; see  specification as filed for detail ed description of substitutions, R-groups  and preferred embodiments
  MOD_RES (15)..(18): Any L- or D-natural or non-natural amino acid, and this range may     encompass 1 or 4 residues; see specification as filed for detailed  description of substitutions, R-groups and preferred emb
  c-term may be amidated
IXPIASSXXTXVSHXXXXAHQGKHETYGHKTPY

SEQ ID NO: 1520 - protein, 33 aa, Artificial Sequence
  Description of Artificial Sequence: Synthetic peptide
  MOD_RES (3)..(3): Any L- or D-natural amino acid and any non-natural amino acid; see  specification as filed for detail ed description of substitutions, R-groups  and preferred embodiments
  MOD_RES (8)..(9): Any L- or D-natural amino acid and any non-natural amino acid; see  specification as filed for detail ed description of substitutions, R-groups  and preferred embodiments
  MOD_RES (11)..(11): Any L- or D-natural amino acid and any non-natural amino acid; see  specification as filed for detail ed description of substitutions, R-groups  and preferred embodiments
  MOD_RES (15)..(18): Any L- or D-natural or non-natural amino acid, and this range may     encompass 1 or 4 residues; see specification as filed for detailed  description of substitutions, R-groups and preferred emb
  c-term may be amidated
ILXIASSXXTXVSHXXXXAHQGKHETYGHKTPY

SEQ ID NO: 1521 - protein, 33 aa, Artificial Sequence
  Description of Artificial Sequence: Synthetic peptide
  MOD_RES (4)..(4): Any L- or D-natural amino acid and any non-natural amino acid; see  specification as filed for detail ed description of substitutions, R-groups  and preferred embodiments
  MOD_RES (8)..(9): Any L- or D-natural amino acid and any non-natural amino acid; see  specification as filed for detail ed description of substitutions, R-groups  and preferred embodiments
  MOD_RES (11)..(11): Any L- or D-natural amino acid and any non-natural amino acid; see  specification as filed for detail ed description of substitutions, R-groups  and preferred embodiments
  MOD_RES (15)..(18): Any L- or D-natural or non-natural amino acid, and this range may     encompass 1 or 4 residues; see specification as filed for detailed  description of substitutions, R-groups and preferred emb
  c-term may be amidated
ILPXASSXXTXVSHXXXXAHQGKHETYGHKTPY

SEQ ID NO: 1522 - protein, 33 aa, Artificial Sequence
  Description of Artificial Sequence: Synthetic peptide
  MOD_RES (5)..(5): Any L- or D-natural amino acid and any non-natural amino acid; see  specification as filed for detail ed description of substitutions, R-groups  and preferred embodiments
  MOD_RES (8)..(9): Any L- or D-natural amino acid and any non-natural amino acid; see  specification as filed for detail ed description of substitutions, R-groups  and preferred embodiments
  MOD_RES (11)..(11): Any L- or D-natural amino acid and any non-natural amino acid; see  specification as filed for detail ed description of substitutions, R-groups  and preferred embodiments
  MOD_RES (15)..(18): Any L- or D-natural or non-natural amino acid, and this range may     encompass 1 or 4 residues; see specification as filed for detailed  description of substitutions, R-groups and preferred emb
  c-term may be amidated
ILPIXSSXXTXVSHXXXXAHQGKHETYGHKTPY

SEQ ID NO: 1523 - protein, 33 aa, Artificial Sequence
  Description of Artificial Sequence: Synthetic peptide
  MOD_RES (6)..(6): Any L- or D-natural amino acid and any non-natural amino acid; see  specification as filed for detail ed description of substitutions, R-groups  and preferred embodiments
  MOD_RES (8)..(9): Any L- or D-natural amino acid and any non-natural amino acid; see  specification as filed for detail ed description of substitutions, R-groups  and preferred embodiments
  MOD_RES (11)..(11): Any L- or D-natural amino acid and any non-natural amino acid; see  specification as filed for detail ed description of substitutions, R-groups  and preferred embodiments
  MOD_RES (15)..(18): Any L- or D-natural or non-natural amino acid, and this range may     encompass 1 or 4 residues; see specification as filed for detailed  description of substitutions, R-groups and preferred emb
  c-term may be amidated
ILPIAXSXXTXVSHXXXXAHQGKHETYGHKTPY

SEQ ID NO: 1524 - protein, 33 aa, Artificial Sequence
  Description of Artificial Sequence: Synthetic peptide
  MOD_RES (7)..(9): Any L- or D-natural amino acid and any non-natural amino acid; see  specification as filed for detail ed description of substitutions, R-groups  and preferred embodiments
  MOD_RES (11)..(11): Any L- or D-natural amino acid and any non-natural amino acid; see  specification as filed for detail ed description of substitutions, R-groups  and preferred embodiments
  MOD_RES (15)..(18): Any L- or D-natural or non-natural amino acid, and this range may     encompass 1 or 4 residues; see specification as filed for detailed  description of substitutions, R-groups and preferred emb
  c-term may be amidated
ILPIASXXXTXVSHXXXXAHQGKHETYGHKTPY

SEQ ID NO: 1525 - protein, 33 aa, Artificial Sequence
  Description of Artificial Sequence: Synthetic peptide
  MOD_RES (1)..(1): Any L- or D-natural amino acid and any non-natural amino acid; see  specification as filed for detail ed description of substitutions, R-groups  and preferred embodiments
  MOD_RES (8)..(9): Any L- or D-natural amino acid and any non-natural amino acid; see  specification as filed for detail ed description of substitutions, R-groups  and preferred embodiments
  MOD_RES (12)..(12): Any L- or D-natural amino acid and any non-natural amino acid; see  specification as filed for detail ed description of substitutions, R-groups  and preferred embodiments
  MOD_RES (15)..(18): Any L- or D-natural or non-natural amino acid, and this range may     encompass 1 or 4 residues; see specification as filed for detailed  description of substitutions, R-groups and preferred emb
  c-term may be amidated
XLPIASSXXTEXSHXXXXAHQGKHETYGHKTPY

SEQ ID NO: 1526 - protein, 33 aa, Artificial Sequence
  Description of Artificial Sequence: Synthetic peptide
  MOD_RES (2)..(2): Any L- or D-natural amino acid and any non-natural amino acid; see  specification as filed for detail ed description of substitutions, R-groups  and preferred embodiments
  MOD_RES (8)..(9): Any L- or D-natural amino acid and any non-natural amino acid; see  specification as filed for detail ed description of substitutions, R-groups  and preferred embodiments
  MOD_RES (12)..(12): Any L- or D-natural amino acid and any non-natural amino acid; see  specification as filed for detail ed description of substitutions, R-groups  and preferred embodiments
  MOD_RES (15)..(18): Any L- or D-natural or non-natural amino acid, and this range may     encompass 1 or 4 residues; see specification as filed for detailed  description of substitutions, R-groups and preferred emb
  c-term may be amidated
IXPIASSXXTEXSHXXXXAHQGKHETYGHKTPY

SEQ ID NO: 1527 - protein, 33 aa, Artificial Sequence
  Description of Artificial Sequence: Synthetic peptide
  MOD_RES (3)..(3): Any L- or D-natural amino acid and any non-natural amino acid; see  specification as filed for detail ed description of substitutions, R-groups  and preferred embodiments
  MOD_RES (8)..(9): Any L- or D-natural amino acid and any non-natural amino acid; see  specification as filed for detail ed description of substitutions, R-groups  and preferred embodiments
  MOD_RES (12)..(12): Any L- or D-natural amino acid and any non-natural amino acid; see  specification as filed for detail ed description of substitutions, R-groups  and preferred embodiments
  MOD_RES (15)..(18): Any L- or D-natural or non-natural amino acid, and this range may     encompass 1 or 4 residues; see specification as filed for detailed  description of substitutions, R-groups and preferred emb
  c-term may be amidated
ILXIASSXXTEXSHXXXXAHQGKHETYGHKTPY

SEQ ID NO: 1528 - protein, 33 aa, Artificial Sequence
  Description of Artificial Sequence: Synthetic peptide
  MOD_RES (4)..(4): Any L- or D-natural amino acid and any non-natural amino acid; see  specification as filed for detail ed description of substitutions, R-groups  and preferred embodiments
  MOD_RES (8)..(9): Any L- or D-natural amino acid and any non-natural amino acid; see  specification as filed for detail ed description of substitutions, R-groups  and preferred embodiments
  MOD_RES (12)..(12): Any L- or D-natural amino acid and any non-natural amino acid; see  specification as filed for detail ed description of substitutions, R-groups  and preferred embodiments
  MOD_RES (15)..(18): Any L- or D-natural or non-natural amino acid, and this range may     encompass 1 or 4 residues; see specification as filed for detailed  description of substitutions, R-groups and preferred emb
  c-term may be amidated
ILPXASSXXTEXSHXXXXAHQGKHETYGHKTPY

SEQ ID NO: 1529 - protein, 33 aa, Artificial Sequence
  Description of Artificial Sequence: Synthetic peptide
  MOD_RES (5)..(5): Any L- or D-natural amino acid and any non-natural amino acid; see  specification as filed for detail ed description of substitutions, R-groups  and preferred embodiments
  MOD_RES (8)..(9): Any L- or D-natural amino acid and any non-natural amino acid; see  specification as filed for detail ed description of substitutions, R-groups  and preferred embodiments
  MOD_RES (12)..(12): Any L- or D-natural amino acid and any non-natural amino acid; see  specification as filed for detail ed description of substitutions, R-groups  and preferred embodiments
  MOD_RES (15)..(18): Any L- or D-natural or non-natural amino acid, and this range may     encompass 1 or 4 residues; see specification as filed for detailed  description of substitutions, R-groups and preferred emb
  c-term may be amidated
ILPIXSSXXTEXSHXXXXAHQGKHETYGHKTPY

SEQ ID NO: 1530 - protein, 33 aa, Artificial Sequence
  Description of Artificial Sequence: Synthetic peptide
  MOD_RES (6)..(6): Any L- or D-natural amino acid and any non-natural amino acid; see  specification as filed for detail ed description of substitutions, R-groups  and preferred embodiments
  MOD_RES (8)..(9): Any L- or D-natural amino acid and any non-natural amino acid; see  specification as filed for detail ed description of substitutions, R-groups  and preferred embodiments
  MOD_RES (12)..(12): Any L- or D-natural amino acid and any non-natural amino acid; see  specification as filed for detail ed description of substitutions, R-groups  and preferred embodiments
  MOD_RES (15)..(18): Any L- or D-natural or non-natural amino acid, and this range may     encompass 1 or 4 residues; see specification as filed for detailed  description of substitutions, R-groups and preferred emb
  c-term may be amidated
ILPIAXSXXTEXSHXXXXAHQGKHETYGHKTPY

SEQ ID NO: 1531 - protein, 33 aa, Artificial Sequence
  Description of Artificial Sequence: Synthetic peptide
  MOD_RES (7)..(9): Any L- or D-natural amino acid and any non-natural amino acid; see  specification as filed for detail ed description of substitutions, R-groups  and preferred embodiments
  MOD_RES (12)..(12): Any L- or D-natural amino acid and any non-natural amino acid; see  specification as filed for detail ed description of substitutions, R-groups  and preferred embodiments
  MOD_RES (15)..(18): Any L- or D-natural or non-natural amino acid, and this range may     encompass 1 or 4 residues; see specification as filed for detailed  description of substitutions, R-groups and preferred emb
  c-term may be amidated
ILPIASXXXTEXSHXXXXAHQGKHETYGHKTPY

SEQ ID NO: 1532 - protein, 33 aa, Artificial Sequence
  Description of Artificial Sequence: Synthetic peptide
  MOD_RES (1)..(1): Any L- or D-natural amino acid and any non-natural amino acid; see  specification as filed for detail ed description of substitutions, R-groups  and preferred embodiments
  MOD_RES (8)..(9): Any L- or D-natural amino acid and any non-natural amino acid; see  specification as filed for detail ed description of substitutions, R-groups  and preferred embodiments
  MOD_RES (13)..(13): Any L- or D-natural amino acid and any non-natural amino acid; see  specification as filed for detail ed description of substitutions, R-groups  and preferred embodiments
  MOD_RES (15)..(18): Any L- or D-natural or non-natural amino acid, and this range may     encompass 1 or 4 residues; see specification as filed for detailed  description of substitutions, R-groups and preferred emb
  c-term may be amidated
XLPIASSXXTEVXHXXXXAHQGKHETYGHKTPY

SEQ ID NO: 1533 - protein, 33 aa, Artificial Sequence
  Description of Artificial Sequence: Synthetic peptide
  MOD_RES (2)..(2): Any L- or D-natural amino acid and any non-natural amino acid; see  specification as filed for detail ed description of substitutions, R-groups  and preferred embodiments
  MOD_RES (8)..(9): Any L- or D-natural amino acid and any non-natural amino acid; see  specification as filed for detail ed description of substitutions, R-groups  and preferred embodiments
  MOD_RES (13)..(13): Any L- or D-natural amino acid and any non-natural amino acid; see  specification as filed for detail ed description of substitutions, R-groups  and preferred embodiments
  MOD_RES (15)..(18): Any L- or D-natural or non-natural amino acid, and this range may     encompass 1 or 4 residues; see specification as filed for detailed  description of substitutions, R-groups and preferred emb
  c-term may be amidated
IXPIASSXXTEVXHXXXXAHQGKHETYGHKTPY

SEQ ID NO: 1534 - protein, 33 aa, Artificial Sequence
  Description of Artificial Sequence: Synthetic peptide
  MOD_RES (3)..(3): Any L- or D-natural amino acid and any non-natural amino acid; see  specification as filed for detail ed description of substitutions, R-groups  and preferred embodiments
  MOD_RES (8)..(9): Any L- or D-natural amino acid and any non-natural amino acid; see  specification as filed for detail ed description of substitutions, R-groups  and preferred embodiments
  MOD_RES (13)..(13): Any L- or D-natural amino acid and any non-natural amino acid; see  specification as filed for detail ed description of substitutions, R-groups  and preferred embodiments
  MOD_RES (15)..(18): Any L- or D-natural or non-natural amino acid, and this range may     encompass 1 or 4 residues; see specification as filed for detailed  description of substitutions, R-groups and preferred emb
  c-term may be amidated
ILXIASSXXTEVXHXXXXAHQGKHETYGHKTPY

SEQ ID NO: 1535 - protein, 33 aa, Artificial Sequence
  Description of Artificial Sequence: Synthetic peptide
  MOD_RES (4)..(4): Any L- or D-natural amino acid and any non-natural amino acid; see  specification as filed for detail ed description of substitutions, R-groups  and preferred embodiments
  MOD_RES (8)..(9): Any L- or D-natural amino acid and any non-natural amino acid; see  specification as filed for detail ed description of substitutions, R-groups  and preferred embodiments
  MOD_RES (13)..(13): Any L- or D-natural amino acid and any non-natural amino acid; see  specification as filed for detail ed description of substitutions, R-groups  and preferred embodiments
  MOD_RES (15)..(18): Any L- or D-natural or non-natural amino acid, and this range may     encompass 1 or 4 residues; see specification as filed for detailed  description of substitutions, R-groups and preferred emb
  c-term may be amidated
ILPXASSXXTEVXHXXXXAHQGKHETYGHKTPY

SEQ ID NO: 1536 - protein, 33 aa, Artificial Sequence
  Description of Artificial Sequence: Synthetic peptide
  MOD_RES (5)..(5): Any L- or D-natural amino acid and any non-natural amino acid; see  specification as filed for detail ed description of substitutions, R-groups  and preferred embodiments
  MOD_RES (8)..(9): Any L- or D-natural amino acid and any non-natural amino acid; see  specification as filed for detail ed description of substitutions, R-groups  and preferred embodiments
  MOD_RES (13)..(13): Any L- or D-natural amino acid and any non-natural amino acid; see  specification as filed for detail ed description of substitutions, R-groups  and preferred embodiments
  MOD_RES (15)..(18): Any L- or D-natural or non-natural amino acid, and this range may     encompass 1 or 4 residues; see specification as filed for detailed  description of substitutions, R-groups and preferred emb
  c-term may be amidated
ILPIXSSXXTEVXHXXXXAHQGKHETYGHKTPY

SEQ ID NO: 1537 - protein, 33 aa, Artificial Sequence
  Description of Artificial Sequence: Synthetic peptide
  MOD_RES (6)..(6): Any L- or D-natural amino acid and any non-natural amino acid; see  specification as filed for detail ed description of substitutions, R-groups  and preferred embodiments
  MOD_RES (8)..(9): Any L- or D-natural amino acid and any non-natural amino acid; see  specification as filed for detail ed description of substitutions, R-groups  and preferred embodiments
  MOD_RES (13)..(13): Any L- or D-natural amino acid and any non-natural amino acid; see  specification as filed for detail ed description of substitutions, R-groups  and preferred embodiments
  MOD_RES (15)..(18): Any L- or D-natural or non-natural amino acid, and this range may     encompass 1 or 4 residues; see specification as filed for detailed  description of substitutions, R-groups and preferred emb
  c-term may be amidated
ILPIAXSXXTEVXHXXXXAHQGKHETYGHKTPY

SEQ ID NO: 1538 - protein, 33 aa, Artificial Sequence
  Description of Artificial Sequence: Synthetic peptide
  MOD_RES (7)..(9): Any L- or D-natural amino acid and any non-natural amino acid; see  specification as filed for detail ed description of substitutions, R-groups  and preferred embodiments
  MOD_RES (13)..(13): Any L- or D-natural amino acid and any non-natural amino acid; see  specification as filed for detail ed description of substitutions, R-groups  and preferred embodiments
  MOD_RES (15)..(18): Any L- or D-natural or non-natural amino acid, and this range may     encompass 1 or 4 residues; see specification as filed for detailed  description of substitutions, R-groups and preferred emb
  c-term may be amidated
ILPIASXXXTEVXHXXXXAHQGKHETYGHKTPY

SEQ ID NO: 1539 - protein, 33 aa, Artificial Sequence
  Description of Artificial Sequence: Synthetic peptide
  MOD_RES (1)..(1): Any L- or D-natural amino acid and any non-natural amino acid; see  specification as filed for detail ed description of substitutions, R-groups  and preferred embodiments
  MOD_RES (8)..(9): Any L- or D-natural amino acid and any non-natural amino acid; see  specification as filed for detail ed description of substitutions, R-groups  and preferred embodiments
  MOD_RES (14)..(14): Any L- or D-natural amino acid and any non-natural amino acid; see  specification as filed for detail ed description of substitutions, R-groups  and preferred embodiments
  MOD_RES (15)..(18): Any L- or D-natural or non-natural amino acid, and this range may     encompass 1 or 4 residues; see specification as filed for detailed  description of substitutions, R-groups and preferred emb
  c-term may be amidated
XLPIASSXXTEVSXXXXXAHQGKHETYGHKTPY

SEQ ID NO: 1540 - protein, 33 aa, Artificial Sequence
  Description of Artificial Sequence: Synthetic peptide
  MOD_RES (2)..(2): Any L- or D-natural amino acid and any non-natural amino acid; see  specification as filed for detail ed description of substitutions, R-groups  and preferred embodiments
  MOD_RES (8)..(9): Any L- or D-natural amino acid and any non-natural amino acid; see  specification as filed for detail ed description of substitutions, R-groups  and preferred embodiments
  MOD_RES (14)..(14): Any L- or D-natural amino acid and any non-natural amino acid; see  specification as filed for detail ed description of substitutions, R-groups  and preferred embodiments
  MOD_RES (15)..(18): Any L- or D-natural or non-natural amino acid, and this range may     encompass 1 or 4 residues; see specification as filed for detailed  description of substitutions, R-groups and preferred emb
  c-term may be amidated
IXPIASSXXTEVSXXXXXAHQGKHETYGHKTPY

SEQ ID NO: 1541 - protein, 33 aa, Artificial Sequence
  Description of Artificial Sequence: Synthetic peptide
  MOD_RES (3)..(3): Any L- or D-natural amino acid and any non-natural amino acid; see  specification as filed for detail ed description of substitutions, R-groups  and preferred embodiments
  MOD_RES (8)..(9): Any L- or D-natural amino acid and any non-natural amino acid; see  specification as filed for detail ed description of substitutions, R-groups  and preferred embodiments
  MOD_RES (14)..(14): Any L- or D-natural amino acid and any non-natural amino acid; see  specification as filed for detail ed description of substitutions, R-groups  and preferred embodiments
  MOD_RES (15)..(18): Any L- or D-natural or non-natural amino acid, and this range may     encompass 1 or 4 residues; see specification as filed for detailed  description of substitutions, R-groups and preferred emb
  c-term may be amidated
ILXIASSXXTEVSXXXXXAHQGKHETYGHKTPY

SEQ ID NO: 1542 - protein, 33 aa, Artificial Sequence
  Description of Artificial Sequence: Synthetic peptide
  MOD_RES (4)..(4): Any L- or D-natural amino acid and any non-natural amino acid; see  specification as filed for detail ed description of substitutions, R-groups  and preferred embodiments
  MOD_RES (8)..(9): Any L- or D-natural amino acid and any non-natural amino acid; see  specification as filed for detail ed description of substitutions, R-groups  and preferred embodiments
  MOD_RES (14)..(14): Any L- or D-natural amino acid and any non-natural amino acid; see  specification as filed for detail ed description of substitutions, R-groups  and preferred embodiments
  MOD_RES (15)..(18): Any L- or D-natural or non-natural amino acid, and this range may     encompass 1 or 4 residues; see specification as filed for detailed  description of substitutions, R-groups and preferred emb
  c-term may be amidated
ILPXASSXXTEVSXXXXXAHQGKHETYGHKTPY

SEQ ID NO: 1543 - protein, 33 aa, Artificial Sequence
  Description of Artificial Sequence: Synthetic peptide
  MOD_RES (5)..(5): Any L- or D-natural amino acid and any non-natural amino acid; see  specification as filed for detail ed description of substitutions, R-groups  and preferred embodiments
  MOD_RES (8)..(9): Any L- or D-natural amino acid and any non-natural amino acid; see  specification as filed for detail ed description of substitutions, R-groups  and preferred embodiments
  MOD_RES (14)..(14): Any L- or D-natural amino acid and any non-natural amino acid; see  specification as filed for detail ed description of substitutions, R-groups  and preferred embodiments
  MOD_RES (15)..(18): Any L- or D-natural or non-natural amino acid, and this range may     encompass 1 or 4 residues; see specification as filed for detailed  description of substitutions, R-groups and preferred emb
  c-term may be amidated
ILPIXSSXXTEVSXXXXXAHQGKHETYGHKTPY

SEQ ID NO: 1544 - protein, 33 aa, Artificial Sequence
  Description of Artificial Sequence: Synthetic peptide
  MOD_RES (6)..(6): Any L- or D-natural amino acid and any non-natural amino acid; see  specification as filed for detail ed description of substitutions, R-groups  and preferred embodiments
  MOD_RES (8)..(9): Any L- or D-natural amino acid and any non-natural amino acid; see  specification as filed for detail ed description of substitutions, R-groups  and preferred embodiments
  MOD_RES (14)..(14): Any L- or D-natural amino acid and any non-natural amino acid; see  specification as filed for detail ed description of substitutions, R-groups  and preferred embodiments
  MOD_RES (15)..(18): Any L- or D-natural or non-natural amino acid, and this range may     encompass 1 or 4 residues; see specification as filed for detailed  description of substitutions, R-groups and preferred emb
  c-term may be amidated
ILPIAXSXXTEVSXXXXXAHQGKHETYGHKTPY

SEQ ID NO: 1545 - protein, 33 aa, Artificial Sequence
  Description of Artificial Sequence: Synthetic peptide
  MOD_RES (7)..(9): Any L- or D-natural amino acid and any non-natural amino acid; see  specification as filed for detail ed description of substitutions, R-groups  and preferred embodiments
  MOD_RES (14)..(14): Any L- or D-natural amino acid and any non-natural amino acid; see  specification as filed for detail ed description of substitutions, R-groups  and preferred embodiments
  MOD_RES (15)..(18): Any L- or D-natural or non-natural amino acid, and this range may     encompass 1 or 4 residues; see specification as filed for detailed  description of substitutions, R-groups and preferred emb
  c-term may be amidated
ILPIASXXXTEVSXXXXXAHQGKHETYGHKTPY

SEQ ID NO: 1546 - protein, 32 aa, Artificial Sequence; identical to SEQ ID NO: 1461
  Description of Artificial Sequence: Synthetic peptide
  MOD_RES (15)..(18): Any L- or D-natural or non-natural amino acid, and this range may     encompass 1 or 4 residues; see specification as filed for detailed  description of substitutions, R-groups and preferred emb
  c-term may be amidated

SEQ ID NO: 1547 - protein, 32 aa, Artificial Sequence; identical to SEQ ID NO: 1462
  Description of Artificial Sequence: Synthetic peptide
  MOD_RES (1)..(1): Any L- or D-natural amino acid and any non-natural amino acid; see  specification as filed for detail ed description of substitutions, R-groups  and preferred embodiments
  MOD_RES (8)..(9): Any L- or D-natural amino acid and any non-natural amino acid; see  specification as filed for detail ed description of substitutions, R-groups  and preferred embodiments
  MOD_RES (15)..(18): Any L- or D-natural or non-natural amino acid, and this range may     encompass 1 or 4 residues; see specification as filed for detailed  description of substitutions, R-groups and preferred emb
  c-term may be amidated

SEQ ID NO: 1548 - protein, 32 aa, Artificial Sequence; identical to SEQ ID NO: 1463
  Description of Artificial Sequence: Synthetic peptide
  MOD_RES (2)..(2): Any L- or D-natural amino acid and any non-natural amino acid; see  specification as filed for detail ed description of substitutions, R-groups  and preferred embodiments
  MOD_RES (8)..(9): Any L- or D-natural amino acid and any non-natural amino acid; see  specification as filed for detail ed description of substitutions, R-groups  and preferred embodiments
  MOD_RES (15)..(18): Any L- or D-natural or non-natural amino acid, and this range may     encompass 1 or 4 residues; see specification as filed for detailed  description of substitutions, R-groups and preferred emb
  c-term may be amidated

SEQ ID NO: 1549 - protein, 32 aa, Artificial Sequence; identical to SEQ ID NO: 1464
  Description of Artificial Sequence: Synthetic peptide
  MOD_RES (3)..(3): Any L- or D-natural amino acid and any non-natural amino acid; see  specification as filed for detail ed description of substitutions, R-groups  and preferred embodiments
  MOD_RES (8)..(9): Any L- or D-natural amino acid and any non-natural amino acid; see  specification as filed for detail ed description of substitutions, R-groups  and preferred embodiments
  MOD_RES (15)..(18): Any L- or D-natural or non-natural amino acid, and this range may     encompass 1 or 4 residues; see specification as filed for detailed  description of substitutions, R-groups and preferred emb
  c-term may be amidated

SEQ ID NO: 1550 - protein, 32 aa, Artificial Sequence; identical to SEQ ID NO: 1465
  Description of Artificial Sequence: Synthetic peptide
  MOD_RES (4)..(4): Any L- or D-natural amino acid and any non-natural amino acid; see  specification as filed for detail ed description of substitutions, R-groups  and preferred embodiments
  MOD_RES (8)..(9): Any L- or D-natural amino acid and any non-natural amino acid; see  specification as filed for detail ed description of substitutions, R-groups  and preferred embodiments
  MOD_RES (15)..(18): Any L- or D-natural or non-natural amino acid, and this range may     encompass 1 or 4 residues; see specification as filed for detailed  description of substitutions, R-groups and preferred emb
  c-term may be amidated

SEQ ID NO: 1551 - protein, 32 aa, Artificial Sequence; identical to SEQ ID NO: 1466
  Description of Artificial Sequence: Synthetic peptide
  MOD_RES (5)..(5): Any L- or D-natural amino acid and any non-natural amino acid; see  specification as filed for detail ed description of substitutions, R-groups  and preferred embodiments
  MOD_RES (8)..(9): Any L- or D-natural amino acid and any non-natural amino acid; see  specification as filed for detail ed description of substitutions, R-groups  and preferred embodiments
  MOD_RES (15)..(18): Any L- or D-natural or non-natural amino acid, and this range may     encompass 1 or 4 residues; see specification as filed for detailed  description of substitutions, R-groups and preferred emb
  c-term may be amidated

SEQ ID NO: 1552 - protein, 32 aa, Artificial Sequence; identical to SEQ ID NO: 1467
  Description of Artificial Sequence: Synthetic peptide
  MOD_RES (6)..(6): Any L- or D-natural amino acid and any non-natural amino acid; see  specification as filed for detail ed description of substitutions, R-groups  and preferred embodiments
  MOD_RES (8)..(9): Any L- or D-natural amino acid and any non-natural amino acid; see  specification as filed for detail ed description of substitutions, R-groups  and preferred embodiments
  MOD_RES (15)..(18): Any L- or D-natural or non-natural amino acid, and this range may     encompass 1 or 4 residues; see specification as filed for detailed  description of substitutions, R-groups and preferred emb
  c-term may be amidated

SEQ ID NO: 1553 - protein, 32 aa, Artificial Sequence; identical to SEQ ID NO: 1468
  Description of Artificial Sequence: Synthetic peptide
  MOD_RES (7)..(9): Any L- or D-natural amino acid and any non-natural amino acid; see  specification as filed for detail ed description of substitutions, R-groups  and preferred embodiments
  MOD_RES (15)..(18): Any L- or D-natural or non-natural amino acid, and this range may     encompass 1 or 4 residues; see specification as filed for detailed  description of substitutions, R-groups and preferred emb
  c-term may be amidated

SEQ ID NO: 1554 - protein, 32 aa, Artificial Sequence; identical to SEQ ID NO: 1469
  Description of Artificial Sequence: Synthetic peptide
  MOD_RES (1)..(1): Any L- or D-natural amino acid and any non-natural amino acid; see  specification as filed for detail ed description of substitutions, R-groups  and preferred embodiments
  MOD_RES (8)..(10): Any L- or D-natural amino acid and any non-natural amino acid; see  specification as filed for detail ed description of substitutions, R-groups  and preferred embodiments
  MOD_RES (15)..(18): Any L- or D-natural or non-natural amino acid, and this range may     encompass 1 or 4 residues; see specification as filed for detailed  description of substitutions, R-groups and preferred emb
  c-term may be amidated

SEQ ID NO: 1555 - protein, 32 aa, Artificial Sequence; identical to SEQ ID NO: 1470
  Description of Artificial Sequence: Synthetic peptide
  MOD_RES (2)..(2): Any L- or D-natural amino acid and any non-natural amino acid; see  specification as filed for detail ed description of substitutions, R-groups  and preferred embodiments
  MOD_RES (8)..(10): Any L- or D-natural amino acid and any non-natural amino acid; see  specification as filed for detail ed description of substitutions, R-groups  and preferred embodiments
  MOD_RES (15)..(18): Any L- or D-natural or non-natural amino acid, and this range may     encompass 1 or 4 residues; see specification as filed for detailed  description of substitutions, R-groups and preferred emb
  c-term may be amidated

SEQ ID NO: 1556 - protein, 32 aa, Artificial Sequence; identical to SEQ ID NO: 1471
  Description of Artificial Sequence: Synthetic peptide
  MOD_RES (3)..(3): Any L- or D-natural amino acid and any non-natural amino acid; see  specification as filed for detail ed description of substitutions, R-groups  and preferred embodiments
  MOD_RES (8)..(10): Any L- or D-natural amino acid and any non-natural amino acid; see  specification as filed for detail ed description of substitutions, R-groups  and preferred embodiments
  MOD_RES (15)..(18): Any L- or D-natural or non-natural amino acid, and this range may     encompass 1 or 4 residues; see specification as filed for detailed  description of substitutions, R-groups and preferred emb
  c-term may be amidated

SEQ ID NO: 1557 - protein, 32 aa, Artificial Sequence; identical to SEQ ID NO: 1472
  Description of Artificial Sequence: Synthetic peptide
  MOD_RES (4)..(4): Any L- or D-natural amino acid and any non-natural amino acid; see  specification as filed for detail ed description of substitutions, R-groups  and preferred embodiments
  MOD_RES (8)..(10): Any L- or D-natural amino acid and any non-natural amino acid; see  specification as filed for detail ed description of substitutions, R-groups  and preferred embodiments
  MOD_RES (15)..(18): Any L- or D-natural or non-natural amino acid, and this range may     encompass 1 or 4 residues; see specification as filed for detailed  description of substitutions, R-groups and preferred emb
  c-term may be amidated

SEQ ID NO: 1558 - protein, 32 aa, Artificial Sequence; identical to SEQ ID NO: 1473
  Description of Artificial Sequence: Synthetic peptide
  MOD_RES (5)..(5): Any L- or D-natural amino acid and any non-natural amino acid; see  specification as filed for detail ed description of substitutions, R-groups  and preferred embodiments
  MOD_RES (8)..(10): Any L- or D-natural amino acid and any non-natural amino acid; see  specification as filed for detail ed description of substitutions, R-groups  and preferred embodiments
  MOD_RES (15)..(18): Any L- or D-natural or non-natural amino acid, and this range may     encompass 1 or 4 residues; see specification as filed for detailed  description of substitutions, R-groups and preferred emb
  c-term may be amidated

SEQ ID NO: 1559 - protein, 32 aa, Artificial Sequence; identical to SEQ ID NO: 1474
  Description of Artificial Sequence: Synthetic peptide
  MOD_RES (6)..(6): Any L- or D-natural amino acid and any non-natural amino acid; see  specification as filed for detail ed description of substitutions, R-groups  and preferred embodiments
  MOD_RES (8)..(10): Any L- or D-natural amino acid and any non-natural amino acid; see  specification as filed for detail ed description of substitutions, R-groups  and preferred embodiments
  MOD_RES (15)..(18): Any L- or D-natural or non-natural amino acid, and this range may     encompass 1 or 4 residues; see specification as filed for detailed  description of substitutions, R-groups and preferred emb
  c-term may be amidated

SEQ ID NO: 1560 - protein, 32 aa, Artificial Sequence; identical to SEQ ID NO: 1475
  Description of Artificial Sequence: Synthetic peptide
  MOD_RES (7)..(10): Any L- or D-natural amino acid and any non-natural amino acid; see  specification as filed for detail ed description of substitutions, R-groups  and preferred embodiments
  MOD_RES (15)..(18): Any L- or D-natural or non-natural amino acid, and this range may     encompass 1 or 4 residues; see specification as filed for detailed  description of substitutions, R-groups and preferred emb
  c-term may be amidated

SEQ ID NO: 1561 - protein, 32 aa, Artificial Sequence; identical to SEQ ID NO: 1476
  Description of Artificial Sequence: Synthetic peptide
  MOD_RES (1)..(1): Any L- or D-natural amino acid and any non-natural amino acid; see  specification as filed for detail ed description of substitutions, R-groups  and preferred embodiments
  MOD_RES (8)..(9): Any L- or D-natural amino acid and any non-natural amino acid; see  specification as filed for detail ed description of substitutions, R-groups  and preferred embodiments
  MOD_RES (11)..(11): Any L- or D-natural amino acid and any non-natural amino acid; see  specification as filed for detail ed description of substitutions, R-groups  and preferred embodiments
  MOD_RES (15)..(18): Any L- or D-natural or non-natural amino acid, and this range may     encompass 1 or 4 residues; see specification as filed for detailed  description of substitutions, R-groups and preferred emb
  c-term may be amidated

SEQ ID NO: 1562 - protein, 32 aa, Artificial Sequence; identical to SEQ ID NO: 1477
  Description of Artificial Sequence: Synthetic peptide
  MOD_RES (2)..(2): Any L- or D-natural amino acid and any non-natural amino acid; see  specification as filed for detail ed description of substitutions, R-groups  and preferred embodiments
  MOD_RES (8)..(9): Any L- or D-natural amino acid and any non-natural amino acid; see  specification as filed for detail ed description of substitutions, R-groups  and preferred embodiments
  MOD_RES (11)..(11): Any L- or D-natural amino acid and any non-natural amino acid; see  specification as filed for detail ed description of substitutions, R-groups  and preferred embodiments
  MOD_RES (15)..(18): Any L- or D-natural or non-natural amino acid, and this range may     encompass 1 or 4 residues; see specification as filed for detailed  description of substitutions, R-groups and preferred emb
  c-term may be amidated

SEQ ID NO: 1563 - protein, 32 aa, Artificial Sequence; identical to SEQ ID NO: 1478
  Description of Artificial Sequence: Synthetic peptide
  MOD_RES (3)..(3): Any L- or D-natural amino acid and any non-natural amino acid; see  specification as filed for detail ed description of substitutions, R-groups  and preferred embodiments
  MOD_RES (8)..(9): Any L- or D-natural amino acid and any non-natural amino acid; see  specification as filed for detail ed description of substitutions, R-groups  and preferred embodiments
  MOD_RES (11)..(11): Any L- or D-natural amino acid and any non-natural amino acid; see  specification as filed for detail ed description of substitutions, R-groups  and preferred embodiments
  MOD_RES (15)..(18): Any L- or D-natural or non-natural amino acid, and this range may     encompass 1 or 4 residues; see specification as filed for detailed  description of substitutions, R-groups and preferred emb
  c-term may be amidated

SEQ ID NO: 1564 - protein, 32 aa, Artificial Sequence; identical to SEQ ID NO: 1479
  Description of Artificial Sequence: Synthetic peptide
  MOD_RES (4)..(4): Any L- or D-natural amino acid and any non-natural amino acid; see  specification as filed for detail ed description of substitutions, R-groups  and preferred embodiments
  MOD_RES (8)..(9): Any L- or D-natural amino acid and any non-natural amino acid; see  specification as filed for detail ed description of substitutions, R-groups  and preferred embodiments
  MOD_RES (11)..(11): Any L- or D-natural amino acid and any non-natural amino acid; see  specification as filed for detail ed description of substitutions, R-groups  and preferred embodiments
  MOD_RES (15)..(18): Any L- or D-natural or non-natural amino acid, and this range may     encompass 1 or 4 residues; see specification as filed for detailed  description of substitutions, R-groups and preferred emb
  c-term may be amidated

SEQ ID NO: 1565 - protein, 32 aa, Artificial Sequence; identical to SEQ ID NO: 1480
  Description of Artificial Sequence: Synthetic peptide
  MOD_RES (5)..(5): Any L- or D-natural amino acid and any non-natural amino acid; see  specification as filed for detail ed description of substitutions, R-groups  and preferred embodiments
  MOD_RES (8)..(9): Any L- or D-natural amino acid and any non-natural amino acid; see  specification as filed for detail ed description of substitutions, R-groups  and preferred embodiments
  MOD_RES (11)..(11): Any L- or D-natural amino acid and any non-natural amino acid; see  specification as filed for detail ed description of substitutions, R-groups  and preferred embodiments
  MOD_RES (15)..(18): Any L- or D-natural or non-natural amino acid, and this range may     encompass 1 or 4 residues; see specification as filed for detailed  description of substitutions, R-groups and preferred emb
  c-term may be amidated

SEQ ID NO: 1566 - protein, 32 aa, Artificial Sequence; identical to SEQ ID NO: 1481
  Description of Artificial Sequence: Synthetic peptide
  MOD_RES (6)..(6): Any L- or D-natural amino acid and any non-natural amino acid; see  specification as filed for detail ed description of substitutions, R-groups  and preferred embodiments
  MOD_RES (8)..(9): Any L- or D-natural amino acid and any non-natural amino acid; see  specification as filed for detail ed description of substitutions, R-groups  and preferred embodiments
  MOD_RES (11)..(11): Any L- or D-natural amino acid and any non-natural amino acid; see  specification as filed for detail ed description of substitutions, R-groups  and preferred embodiments
  MOD_RES (15)..(18): Any L- or D-natural or non-natural amino acid, and this range may     encompass 1 or 4 residues; see specification as filed for detailed  description of substitutions, R-groups and preferred emb
  c-term may be amidated

SEQ ID NO: 1567 - protein, 32 aa, Artificial Sequence; identical to SEQ ID NO: 1482
  Description of Artificial Sequence: Synthetic peptide
  MOD_RES (7)..(9): Any L- or D-natural amino acid and any non-natural amino acid; see  specification as filed for detail ed description of substitutions, R-groups  and preferred embodiments
  MOD_RES (11)..(11): Any L- or D-natural amino acid and any non-natural amino acid; see  specification as filed for detail ed description of substitutions, R-groups  and preferred embodiments
  MOD_RES (15)..(18): Any L- or D-natural or non-natural amino acid, and this range may     encompass 1 or 4 residues; see specification as filed for detailed  description of substitutions, R-groups and preferred emb
  c-term may be amidated

SEQ ID NO: 1568 - protein, 32 aa, Artificial Sequence; identical to SEQ ID NO: 1483
  Description of Artificial Sequence: Synthetic peptide
  MOD_RES (1)..(1): Any L- or D-natural amino acid and any non-natural amino acid; see  specification as filed for detail ed description of substitutions, R-groups  and preferred embodiments
  MOD_RES (8)..(9): Any L- or D-natural amino acid and any non-natural amino acid; see  specification as filed for detail ed description of substitutions, R-groups  and preferred embodiments
  MOD_RES (12)..(12): Any L- or D-natural amino acid and any non-natural amino acid; see  specification as filed for detail ed description of substitutions, R-groups  and preferred embodiments
  MOD_RES (15)..(18): Any L- or D-natural or non-natural amino acid, and this range may     encompass 1 or 4 residues; see specification as filed for detailed  description of substitutions, R-groups and preferred emb
  c-term may be amidated

SEQ ID NO: 1569 - protein, 32 aa, Artificial Sequence; identical to SEQ ID NO: 1484
  Description of Artificial Sequence: Synthetic peptide
  MOD_RES (2)..(2): Any L- or D-natural amino acid and any non-natural amino acid; see  specification as filed for detail ed description of substitutions, R-groups  and preferred embodiments
  MOD_RES (8)..(9): Any L- or D-natural amino acid and any non-natural amino acid; see  specification as filed for detail ed description of substitutions, R-groups  and preferred embodiments
  MOD_RES (12)..(12): Any L- or D-natural amino acid and any non-natural amino acid; see  specification as filed for detail ed description of substitutions, R-groups  and preferred embodiments
  MOD_RES (15)..(18): Any L- or D-natural or non-natural amino acid, and this range may     encompass 1 or 4 residues; see specification as filed for detailed  description of substitutions, R-groups and preferred emb
  c-term may be amidated

SEQ ID NO: 1570 - protein, 32 aa, Artificial Sequence; identical to SEQ ID NO: 1485
  Description of Artificial Sequence: Synthetic peptide
  MOD_RES (3)..(3): Any L- or D-natural amino acid and any non-natural amino acid; see  specification as filed for detail ed description of substitutions, R-groups  and preferred embodiments
  MOD_RES (8)..(9): Any L- or D-natural amino acid and any non-natural amino acid; see  specification as filed for detail ed description of substitutions, R-groups  and preferred embodiments
  MOD_RES (12)..(12): Any L- or D-natural amino acid and any non-natural amino acid; see  specification as filed for detail ed description of substitutions, R-groups  and preferred embodiments
  MOD_RES (15)..(18): Any L- or D-natural or non-natural amino acid, and this range may     encompass 1 or 4 residues; see specification as filed for detailed  description of substitutions, R-groups and preferred emb
  c-term may be amidated

SEQ ID NO: 1571 - protein, 32 aa, Artificial Sequence; identical to SEQ ID NO: 1486
  Description of Artificial Sequence: Synthetic peptide
  MOD_RES (4)..(4): Any L- or D-natural amino acid and any non-natural amino acid; see  specification as filed for detail ed description of substitutions, R-groups  and preferred embodiments
  MOD_RES (8)..(9): Any L- or D-natural amino acid and any non-natural amino acid; see  specification as filed for detail ed description of substitutions, R-groups  and preferred embodiments
  MOD_RES (12)..(12): Any L- or D-natural amino acid and any non-natural amino acid; see  specification as filed for detail ed description of substitutions, R-groups  and preferred embodiments
  MOD_RES (15)..(18): Any L- or D-natural or non-natural amino acid, and this range may     encompass 1 or 4 residues; see specification as filed for detailed  description of substitutions, R-groups and preferred emb
  c-term may be amidated

SEQ ID NO: 1572 - protein, 32 aa, Artificial Sequence; identical to SEQ ID NO: 1487
  Description of Artificial Sequence: Synthetic peptide
  MOD_RES (5)..(5): Any L- or D-natural amino acid and any non-natural amino acid; see  specification as filed for detail ed description of substitutions, R-groups  and preferred embodiments
  MOD_RES (8)..(9): Any L- or D-natural amino acid and any non-natural amino acid; see  specification as filed for detail ed description of substitutions, R-groups  and preferred embodiments
  MOD_RES (12)..(12): Any L- or D-natural amino acid and any non-natural amino acid; see  specification as filed for detail ed description of substitutions, R-groups  and preferred embodiments
  MOD_RES (15)..(18): Any L- or D-natural or non-natural amino acid, and this range may     encompass 1 or 4 residues; see specification as filed for detailed  description of substitutions, R-groups and preferred emb
  c-term may be amidated

SEQ ID NO: 1573 - protein, 32 aa, Artificial Sequence; identical to SEQ ID NO: 1488
  Description of Artificial Sequence: Synthetic peptide
  MOD_RES (6)..(6): Any L- or D-natural amino acid and any non-natural amino acid; see  specification as filed for detail ed description of substitutions, R-groups  and preferred embodiments
  MOD_RES (8)..(9): Any L- or D-natural amino acid and any non-natural amino acid; see  specification as filed for detail ed description of substitutions, R-groups  and preferred embodiments
  MOD_RES (12)..(12): Any L- or D-natural amino acid and any non-natural amino acid; see  specification as filed for detail ed description of substitutions, R-groups  and preferred embodiments
  MOD_RES (15)..(18): Any L- or D-natural or non-natural amino acid, and this range may     encompass 1 or 4 residues; see specification as filed for detailed  description of substitutions, R-groups and preferred emb
  c-term may be amidated

SEQ ID NO: 1574 - protein, 32 aa, Artificial Sequence; identical to SEQ ID NO: 1489
  Description of Artificial Sequence: Synthetic peptide
  MOD_RES (7)..(9): Any L- or D-natural amino acid and any non-natural amino acid; see  specification as filed for detail ed description of substitutions, R-groups  and preferred embodiments
  MOD_RES (12)..(12): Any L- or D-natural amino acid and any non-natural amino acid; see  specification as filed for detail ed description of substitutions, R-groups  and preferred embodiments
  MOD_RES (15)..(18): Any L- or D-natural or non-natural amino acid, and this range may     encompass 1 or 4 residues; see specification as filed for detailed  description of substitutions, R-groups and preferred emb
  c-term may be amidated

SEQ ID NO: 1575 - protein, 32 aa, Artificial Sequence; identical to SEQ ID NO: 1490
  Description of Artificial Sequence: Synthetic peptide
  MOD_RES (1)..(1): Any L- or D-natural amino acid and any non-natural amino acid; see  specification as filed for detail ed description of substitutions, R-groups  and preferred embodiments
  MOD_RES (8)..(9): Any L- or D-natural amino acid and any non-natural amino acid; see  specification as filed for detail ed description of substitutions, R-groups  and preferred embodiments
  MOD_RES (13)..(13): Any L- or D-natural amino acid and any non-natural amino acid; see  specification as filed for detail ed description of substitutions, R-groups  and preferred embodiments
  MOD_RES (15)..(18): Any L- or D-natural or non-natural amino acid, and this range may     encompass 1 or 4 residues; see specification as filed for detailed  description of substitutions, R-groups and preferred emb
  c-term may be amidated

SEQ ID NO: 1576 - protein, 32 aa, Artificial Sequence; identical to SEQ ID NO: 1491
  Description of Artificial Sequence: Synthetic peptide
  MOD_RES (2)..(2): Any L- or D-natural amino acid and any non-natural amino acid; see  specification as filed for detail ed description of substitutions, R-groups  and preferred embodiments
  MOD_RES (8)..(9): Any L- or D-natural amino acid and any non-natural amino acid; see  specification as filed for detail ed description of substitutions, R-groups  and preferred embodiments
  MOD_RES (13)..(13): Any L- or D-natural amino acid and any non-natural amino acid; see  specification as filed for detail ed description of substitutions, R-groups  and preferred embodiments
  MOD_RES (15)..(18): Any L- or D-natural or non-natural amino acid, and this range may     encompass 1 or 4 residues; see specification as filed for detailed  description of substitutions, R-groups and preferred emb
  c-term may be amidated

SEQ ID NO: 1577 - protein, 32 aa, Artificial Sequence; identical to SEQ ID NO: 1492
  Description of Artificial Sequence: Synthetic peptide
  MOD_RES (3)..(3): Any L- or D-natural amino acid and any non-natural amino acid; see  specification as filed for detail ed description of substitutions, R-groups  and preferred embodiments
  MOD_RES (8)..(9): Any L- or D-natural amino acid and any non-natural amino acid; see  specification as filed for detail ed description of substitutions, R-groups  and preferred embodiments
  MOD_RES (13)..(13): Any L- or D-natural amino acid and any non-natural amino acid; see  specification as filed for detail ed description of substitutions, R-groups  and preferred embodiments
  MOD_RES (15)..(18): Any L- or D-natural or non-natural amino acid, and this range may     encompass 1 or 4 residues; see specification as filed for detailed  description of substitutions, R-groups and preferred emb
  c-term may be amidated

SEQ ID NO: 1578 - protein, 32 aa, Artificial Sequence; identical to SEQ ID NO: 1493
  Description of Artificial Sequence: Synthetic peptide
  MOD_RES (4)..(4): Any L- or D-natural amino acid and any non-natural amino acid; see  specification as filed for detail ed description of substitutions, R-groups  and preferred embodiments
  MOD_RES (8)..(9): Any L- or D-natural amino acid and any non-natural amino acid; see  specification as filed for detail ed description of substitutions, R-groups  and preferred embodiments
  MOD_RES (13)..(13): Any L- or D-natural amino acid and any non-natural amino acid; see  specification as filed for detail ed description of substitutions, R-groups  and preferred embodiments
  MOD_RES (15)..(18): Any L- or D-natural or non-natural amino acid, and this range may     encompass 1 or 4 residues; see specification as filed for detailed  description of substitutions, R-groups and preferred emb
  c-term may be amidated

SEQ ID NO: 1579 - protein, 32 aa, Artificial Sequence; identical to SEQ ID NO: 1494
  Description of Artificial Sequence: Synthetic peptide
  MOD_RES (5)..(5): Any L- or D-natural amino acid and any non-natural amino acid; see  specification as filed for detail ed description of substitutions, R-groups  and preferred embodiments
  MOD_RES (8)..(9): Any L- or D-natural amino acid and any non-natural amino acid; see  specification as filed for detail ed description of substitutions, R-groups  and preferred embodiments
  MOD_RES (13)..(13): Any L- or D-natural amino acid and any non-natural amino acid; see  specification as filed for detail ed description of substitutions, R-groups  and preferred embodiments
  MOD_RES (15)..(18): Any L- or D-natural or non-natural amino acid, and this range may     encompass 1 or 4 residues; see specification as filed for detailed  description of substitutions, R-groups and preferred emb
  c-term may be amidated

SEQ ID NO: 1580 - protein, 32 aa, Artificial Sequence; identical to SEQ ID NO: 1495
  Description of Artificial Sequence: Synthetic peptide
  MOD_RES (6)..(6): Any L- or D-natural amino acid and any non-natural amino acid; see  specification as filed for detail ed description of substitutions, R-groups  and preferred embodiments
  MOD_RES (8)..(9): Any L- or D-natural amino acid and any non-natural amino acid; see  specification as filed for detail ed description of substitutions, R-groups  and preferred embodiments
  MOD_RES (13)..(13): Any L- or D-natural amino acid and any non-natural amino acid; see  specification as filed for detail ed description of substitutions, R-groups  and preferred embodiments
  MOD_RES (15)..(18): Any L- or D-natural or non-natural amino acid, and this range may     encompass 1 or 4 residues; see specification as filed for detailed  description of substitutions, R-groups and preferred emb
  c-term may be amidated

SEQ ID NO: 1581 - protein, 32 aa, Artificial Sequence; identical to SEQ ID NO: 1496
  Description of Artificial Sequence: Synthetic peptide
  MOD_RES (7)..(9): Any L- or D-natural amino acid and any non-natural amino acid; see  specification as filed for detail ed description of substitutions, R-groups  and preferred embodiments
  MOD_RES (13)..(13): Any L- or D-natural amino acid and any non-natural amino acid; see  specification as filed for detail ed description of substitutions, R-groups  and preferred embodiments
  MOD_RES (15)..(18): Any L- or D-natural or non-natural amino acid, and this range may     encompass 1 or 4 residues; see specification as filed for detailed  description of substitutions, R-groups and preferred emb
  c-term may be amidated

SEQ ID NO: 1582 - protein, 32 aa, Artificial Sequence; identical to SEQ ID NO: 1497
  Description of Artificial Sequence: Synthetic peptide
  MOD_RES (1)..(1): Any L- or D-natural amino acid and any non-natural amino acid; see  specification as filed for detail ed description of substitutions, R-groups  and preferred embodiments
  MOD_RES (8)..(9): Any L- or D-natural amino acid and any non-natural amino acid; see  specification as filed for detail ed description of substitutions, R-groups  and preferred embodiments
  MOD_RES (14)..(14): Any L- or D-natural amino acid and any non-natural amino acid; see  specification as filed for detail ed description of substitutions, R-groups  and preferred embodiments
  MOD_RES (15)..(18): Any L- or D-natural or non-natural amino acid, and this range may     encompass 1 or 4 residues; see specification as filed for detailed  description of substitutions, R-groups and preferred emb
  c-term may be amidated

SEQ ID NO: 1583 - protein, 32 aa, Artificial Sequence; identical to SEQ ID NO: 1498
  Description of Artificial Sequence: Synthetic peptide
  MOD_RES (2)..(2): Any L- or D-natural amino acid and any non-natural amino acid; see  specification as filed for detail ed description of substitutions, R-groups  and preferred embodiments
  MOD_RES (8)..(9): Any L- or D-natural amino acid and any non-natural amino acid; see  specification as filed for detail ed description of substitutions, R-groups  and preferred embodiments
  MOD_RES (14)..(14): Any L- or D-natural amino acid and any non-natural amino acid; see  specification as filed for detail ed description of substitutions, R-groups  and preferred embodiments
  MOD_RES (15)..(18): Any L- or D-natural or non-natural amino acid, and this range may     encompass 1 or 4 residues; see specification as filed for detailed  description of substitutions, R-groups and preferred emb
  c-term may be amidated

SEQ ID NO: 1584 - protein, 32 aa, Artificial Sequence; identical to SEQ ID NO: 1499
  Description of Artificial Sequence: Synthetic peptide
  MOD_RES (3)..(3): Any L- or D-natural amino acid and any non-natural amino acid; see  specification as filed for detail ed description of substitutions, R-groups  and preferred embodiments
  MOD_RES (8)..(9): Any L- or D-natural amino acid and any non-natural amino acid; see  specification as filed for detail ed description of substitutions, R-groups  and preferred embodiments
  MOD_RES (14)..(14): Any L- or D-natural amino acid and any non-natural amino acid; see  specification as filed for detail ed description of substitutions, R-groups  and preferred embodiments
  MOD_RES (15)..(18): Any L- or D-natural or non-natural amino acid, and this range may     encompass 1 or 4 residues; see specification as filed for detailed  description of substitutions, R-groups and preferred emb
  c-term may be amidated

SEQ ID NO: 1585 - protein, 32 aa, Artificial Sequence; identical to SEQ ID NO: 1500
  Description of Artificial Sequence: Synthetic peptide
  MOD_RES (4)..(4): Any L- or D-natural amino acid and any non-natural amino acid; see  specification as filed for detail ed description of substitutions, R-groups  and preferred embodiments
  MOD_RES (8)..(9): Any L- or D-natural amino acid and any non-natural amino acid; see  specification as filed for detail ed description of substitutions, R-groups  and preferred embodiments
  MOD_RES (14)..(14): Any L- or D-natural amino acid and any non-natural amino acid; see  specification as filed for detail ed description of substitutions, R-groups  and preferred embodiments
  MOD_RES (15)..(18): Any L- or D-natural or non-natural amino acid, and this range may     encompass 1 or 4 residues; see specification as filed for detailed  description of substitutions, R-groups and preferred emb
  c-term may be amidated

SEQ ID NO: 1586 - protein, 32 aa, Artificial Sequence; identical to SEQ ID NO: 1501
  Description of Artificial Sequence: Synthetic peptide
  MOD_RES (5)..(5): Any L- or D-natural amino acid and any non-natural amino acid; see  specification as filed for detail ed description of substitutions, R-groups  and preferred embodiments
  MOD_RES (8)..(9): Any L- or D-natural amino acid and any non-natural amino acid; see  specification as filed for detail ed description of substitutions, R-groups  and preferred embodiments
  MOD_RES (14)..(14): Any L- or D-natural amino acid and any non-natural amino acid; see  specification as filed for detail ed description of substitutions, R-groups  and preferred embodiments
  MOD_RES (15)..(18): Any L- or D-natural or non-natural amino acid, and this range may     encompass 1 or 4 residues; see specification as filed for detailed  description of substitutions, R-groups and preferred emb
  c-term may be amidated

SEQ ID NO: 1587 - protein, 32 aa, Artificial Sequence; identical to SEQ ID NO: 1502
  Description of Artificial Sequence: Synthetic peptide
  MOD_RES (6)..(6): Any L- or D-natural amino acid and any non-natural amino acid; see  specification as filed for detail ed description of substitutions, R-groups  and preferred embodiments
  MOD_RES (8)..(9): Any L- or D-natural amino acid and any non-natural amino acid; see  specification as filed for detail ed description of substitutions, R-groups  and preferred embodiments
  MOD_RES (14)..(14): Any L- or D-natural amino acid and any non-natural amino acid; see  specification as filed for detail ed description of substitutions, R-groups  and preferred embodiments
  MOD_RES (15)..(18): Any L- or D-natural or non-natural amino acid, and this range may     encompass 1 or 4 residues; see specification as filed for detailed  description of substitutions, R-groups and preferred emb
  c-term may be amidated

SEQ ID NO: 1588 - protein, 32 aa, Artificial Sequence; identical to SEQ ID NO: 1503
  Description of Artificial Sequence: Synthetic peptide
  MOD_RES (7)..(9): Any L- or D-natural amino acid and any non-natural amino acid; see  specification as filed for detail ed description of substitutions, R-groups  and preferred embodiments
  MOD_RES (14)..(14): Any L- or D-natural amino acid and any non-natural amino acid; see  specification as filed for detail ed description of substitutions, R-groups  and preferred embodiments
  MOD_RES (15)..(18): Any L- or D-natural or non-natural amino acid, and this range may     encompass 1 or 4 residues; see specification as filed for detailed  description of substitutions, R-groups and preferred emb
  c-term may be amidated

SEQ ID NO: 1589 - protein, 33 aa, Artificial Sequence
  Description of Artificial Sequence: Synthetic peptide
  MOD_RES (15)..(18): Any L- or D-natural or non-natural amino acid, and this range may     encompass 1 or 4 residues; see specification as filed for detailed  description of substitutions, R-groups and preferred emb
  c-term may be amidated
ILPIASSCCTEVSHXXXXAHQGKHETYGHKTPY

SEQ ID NO: 1590 - protein, 33 aa, Artificial Sequence; identical to SEQ ID NO: 1504
  Description of Artificial Sequence: Synthetic peptide
  MOD_RES (1)..(1): Any L- or D-natural amino acid and any non-natural amino acid; see  specification as filed for detail ed description of substitutions, R-groups  and preferred embodiments
  MOD_RES (8)..(9): Any L- or D-natural amino acid and any non-natural amino acid; see  specification as filed for detail ed description of substitutions, R-groups  and preferred embodiments
  MOD_RES (15)..(18): Any L- or D-natural or non-natural amino acid, and this range may     encompass 1 or 4 residues; see specification as filed for detailed  description of substitutions, R-groups and preferred emb
  c-term may be amidated

SEQ ID NO: 1591 - protein, 33 aa, Artificial Sequence; identical to SEQ ID NO: 1505
  Description of Artificial Sequence: Synthetic peptide
  MOD_RES (2)..(2): Any L- or D-natural amino acid and any non-natural amino acid; see  specification as filed for detail ed description of substitutions, R-groups  and preferred embodiments
  MOD_RES (8)..(9): Any L- or D-natural amino acid and any non-natural amino acid; see  specification as filed for detail ed description of substitutions, R-groups  and preferred embodiments
  MOD_RES (15)..(18): Any L- or D-natural or non-natural amino acid, and this range may     encompass 1 or 4 residues; see specification as filed for detailed  description of substitutions, R-groups and preferred emb
  c-term may be amidated

SEQ ID NO: 1592 - protein, 33 aa, Artificial Sequence; identical to SEQ ID NO: 1506
  Description of Artificial Sequence: Synthetic peptide
  MOD_RES (3)..(3): Any L- or D-natural amino acid and any non-natural amino acid; see  specification as filed for detail ed description of substitutions, R-groups  and preferred embodiments
  MOD_RES (8)..(9): Any L- or D-natural amino acid and any non-natural amino acid; see  specification as filed for detail ed description of substitutions, R-groups  and preferred embodiments
  MOD_RES (15)..(18): Any L- or D-natural or non-natural amino acid, and this range may     encompass 1 or 4 residues; see specification as filed for detailed  description of substitutions, R-groups and preferred emb
  c-term may be amidated

SEQ ID NO: 1593 - protein, 33 aa, Artificial Sequence; identical to SEQ ID NO: 1507
  Description of Artificial Sequence: Synthetic peptide
  MOD_RES (4)..(4): Any L- or D-natural amino acid and any non-natural amino acid; see  specification as filed for detail ed description of substitutions, R-groups  and preferred embodiments
  MOD_RES (8)..(9): Any L- or D-natural amino acid and any non-natural amino acid; see  specification as filed for detail ed description of substitutions, R-groups  and preferred embodiments
  MOD_RES (15)..(18): Any L- or D-natural or non-natural amino acid, and this range may     encompass 1 or 4 residues; see specification as filed for detailed  description of substitutions, R-groups and preferred emb
  c-term may be amidated

SEQ ID NO: 1594 - protein, 33 aa, Artificial Sequence; identical to SEQ ID NO: 1508
  Description of Artificial Sequence: Synthetic peptide
  MOD_RES (5)..(5): Any L- or D-natural amino acid and any non-natural amino acid; see  specification as filed for detail ed description of substitutions, R-groups  and preferred embodiments
  MOD_RES (8)..(9): Any L- or D-natural amino acid and any non-natural amino acid; see  specification as filed for detail ed description of substitutions, R-groups  and preferred embodiments
  MOD_RES (15)..(18): Any L- or D-natural or non-natural amino acid, and this range may     encompass 1 or 4 residues; see specification as filed for detailed  description of substitutions, R-groups and preferred emb
  c-term may be amidated

SEQ ID NO: 1595 - protein, 33 aa, Artificial Sequence; identical to SEQ ID NO: 1509
  Description of Artificial Sequence: Synthetic peptide
  MOD_RES (6)..(6): Any L- or D-natural amino acid and any non-natural amino acid; see  specification as filed for detail ed description of substitutions, R-groups  and preferred embodiments
  MOD_RES (8)..(9): Any L- or D-natural amino acid and any non-natural amino acid; see  specification as filed for detail ed description of substitutions, R-groups  and preferred embodiments
  MOD_RES (15)..(18): Any L- or D-natural or non-natural amino acid, and this range may     encompass 1 or 4 residues; see specification as filed for detailed  description of substitutions, R-groups and preferred emb
  c-term may be amidated

SEQ ID NO: 1596 - protein, 33 aa, Artificial Sequence; identical to SEQ ID NO: 1510
  Description of Artificial Sequence: Synthetic peptide
  MOD_RES (7)..(9): Any L- or D-natural amino acid and any non-natural amino acid; see  specification as filed for detail ed description of substitutions, R-groups  and preferred embodiments
  MOD_RES (15)..(18): Any L- or D-natural or non-natural amino acid, and this range may     encompass 1 or 4 residues; see specification as filed for detailed  description of substitutions, R-groups and preferred emb
  c-term may be amidated

SEQ ID NO: 1597 - protein, 33 aa, Artificial Sequence; identical to SEQ ID NO: 1511
  Description of Artificial Sequence: Synthetic peptide
  MOD_RES (1)..(1): Any L- or D-natural amino acid and any non-natural amino acid; see  specification as filed for detail ed description of substitutions, R-groups  and preferred embodiments
  MOD_RES (8)..(10): Any L- or D-natural amino acid and any non-natural amino acid; see  specification as filed for detail ed description of substitutions, R-groups  and preferred embodiments
  MOD_RES (15)..(18): Any L- or D-natural or non-natural amino acid, and this range may     encompass 1 or 4 residues; see specification as filed for detailed  description of substitutions, R-groups and preferred emb
  c-term may be amidated

SEQ ID NO: 1598 - protein, 33 aa, Artificial Sequence; identical to SEQ ID NO: 1512
  Description of Artificial Sequence: Synthetic peptide
  MOD_RES (2)..(2): Any L- or D-natural amino acid and any non-natural amino acid; see  specification as filed for detail ed description of substitutions, R-groups  and preferred embodiments
  MOD_RES (8)..(10): Any L- or D-natural amino acid and any non-natural amino acid; see  specification as filed for detail ed description of substitutions, R-groups  and preferred embodiments
  MOD_RES (15)..(18): Any L- or D-natural or non-natural amino acid, and this range may     encompass 1 or 4 residues; see specification as filed for detailed  description of substitutions, R-groups and preferred emb
  c-term may be amidated

SEQ ID NO: 1599 - protein, 33 aa, Artificial Sequence; identical to SEQ ID NO: 1513
  Description of Artificial Sequence: Synthetic peptide
  MOD_RES (3)..(3): Any L- or D-natural amino acid and any non-natural amino acid; see  specification as filed for detail ed description of substitutions, R-groups  and preferred embodiments
  MOD_RES (8)..(10): Any L- or D-natural amino acid and any non-natural amino acid; see  specification as filed for detail ed description of substitutions, R-groups  and preferred embodiments
  MOD_RES (15)..(18): Any L- or D-natural or non-natural amino acid, and this range may     encompass 1 or 4 residues; see specification as filed for detailed  description of substitutions, R-groups and preferred emb
  c-term may be amidated

SEQ ID NO: 1600 - protein, 33 aa, Artificial Sequence; identical to SEQ ID NO: 1514
  Description of Artificial Sequence: Synthetic peptide
  MOD_RES (4)..(4): Any L- or D-natural amino acid and any non-natural amino acid; see  specification as filed for detail ed description of substitutions, R-groups  and preferred embodiments
  MOD_RES (8)..(10): Any L- or D-natural amino acid and any non-natural amino acid; see  specification as filed for detail ed description of substitutions, R-groups  and preferred embodiments
  MOD_RES (15)..(18): Any L- or D-natural or non-natural amino acid, and this range may     encompass 1 or 4 residues; see specification as filed for detailed  description of substitutions, R-groups and preferred emb
  c-term may be amidated

SEQ ID NO: 1601 - protein, 33 aa, Artificial Sequence; identical to SEQ ID NO: 1515
  Description of Artificial Sequence: Synthetic peptide
  MOD_RES (5)..(5): Any L- or D-natural amino acid and any non-natural amino acid; see  specification as filed for detail ed description of substitutions, R-groups  and preferred embodiments
  MOD_RES (8)..(10): Any L- or D-natural amino acid and any non-natural amino acid; see  specification as filed for detail ed description of substitutions, R-groups  and preferred embodiments
  MOD_RES (15)..(18): Any L- or D-natural or non-natural amino acid, and this range may     encompass 1 or 4 residues; see specification as filed for detailed  description of substitutions, R-groups and preferred emb
  c-term may be amidated

SEQ ID NO: 1602 - protein, 33 aa, Artificial Sequence; identical to SEQ ID NO: 1516
  Description of Artificial Sequence: Synthetic peptide
  MOD_RES (6)..(6): Any L- or D-natural amino acid and any non-natural amino acid; see  specification as filed for detail ed description of substitutions, R-groups  and preferred embodiments
  MOD_RES (8)..(10): Any L- or D-natural amino acid and any non-natural amino acid; see  specification as filed for detail ed description of substitutions, R-groups  and preferred embodiments
  MOD_RES (15)..(18): Any L- or D-natural or non-natural amino acid, and this range may     encompass 1 or 4 residues; see specification as filed for detailed  description of substitutions, R-groups and preferred emb
  c-term may be amidated

SEQ ID NO: 1603 - protein, 33 aa, Artificial Sequence; identical to SEQ ID NO: 1517
  Description of Artificial Sequence: Synthetic peptide
  MOD_RES (7)..(10): Any L- or D-natural amino acid and any non-natural amino acid; see  specification as filed for detail ed description of substitutions, R-groups  and preferred embodiments
  MOD_RES (15)..(18): Any L- or D-natural or non-natural amino acid, and this range may     encompass 1 or 4 residues; see specification as filed for detailed  description of substitutions, R-groups and preferred emb
  c-term may be amidated

SEQ ID NO: 1604 - protein, 33 aa, Artificial Sequence; identical to SEQ ID NO: 1518
  Description of Artificial Sequence: Synthetic peptide
  MOD_RES (1)..(1): Any L- or D-natural amino acid and any non-natural amino acid; see  specification as filed for detail ed description of substitutions, R-groups  and preferred embodiments
  MOD_RES (8)..(9): Any L- or D-natural amino acid and any non-natural amino acid; see  specification as filed for detail ed description of substitutions, R-groups  and preferred embodiments
  MOD_RES (11)..(11): Any L- or D-natural amino acid and any non-natural amino acid; see  specification as filed for detail ed description of substitutions, R-groups  and preferred embodiments
  MOD_RES (15)..(18): Any L- or D-natural or non-natural amino acid, and this range may     encompass 1 or 4 residues; see specification as filed for detailed  description of substitutions, R-groups and preferred emb
  c-term may be amidated

SEQ ID NO: 1605 - protein, 33 aa, Artificial Sequence; identical to SEQ ID NO: 1519
  Description of Artificial Sequence: Synthetic peptide
  MOD_RES (2)..(2): Any L- or D-natural amino acid and any non-natural amino acid; see  specification as filed for detail ed description of substitutions, R-groups  and preferred embodiments
  MOD_RES (8)..(9): Any L- or D-natural amino acid and any non-natural amino acid; see  specification as filed for detail ed description of substitutions, R-groups  and preferred embodiments
  MOD_RES (11)..(11): Any L- or D-natural amino acid and any non-natural amino acid; see  specification as filed for detail ed description of substitutions, R-groups  and preferred embodiments
  MOD_RES (15)..(18): Any L- or D-natural or non-natural amino acid, and this range may     encompass 1 or 4 residues; see specification as filed for detailed  description of substitutions, R-groups and preferred emb
  c-term may be amidated

SEQ ID NO: 1606 - protein, 33 aa, Artificial Sequence; identical to SEQ ID NO: 1520
  Description of Artificial Sequence: Synthetic peptide
  MOD_RES (3)..(3): Any L- or D-natural amino acid and any non-natural amino acid; see  specification as filed for detail ed description of substitutions, R-groups  and preferred embodiments
  MOD_RES (8)..(9): Any L- or D-natural amino acid and any non-natural amino acid; see  specification as filed for detail ed description of substitutions, R-groups  and preferred embodiments
  MOD_RES (11)..(11): Any L- or D-natural amino acid and any non-natural amino acid; see  specification as filed for detail ed description of substitutions, R-groups  and preferred embodiments
  MOD_RES (15)..(18): Any L- or D-natural or non-natural amino acid, and this range may     encompass 1 or 4 residues; see specification as filed for detailed  description of substitutions, R-groups and preferred emb
  c-term may be amidated

SEQ ID NO: 1607 - protein, 33 aa, Artificial Sequence; identical to SEQ ID NO: 1521
  Description of Artificial Sequence: Synthetic peptide
  MOD_RES (4)..(4): Any L- or D-natural amino acid and any non-natural amino acid; see  specification as filed for detail ed description of substitutions, R-groups  and preferred embodiments
  MOD_RES (8)..(9): Any L- or D-natural amino acid and any non-natural amino acid; see  specification as filed for detail ed description of substitutions, R-groups  and preferred embodiments
  MOD_RES (11)..(11): Any L- or D-natural amino acid and any non-natural amino acid; see  specification as filed for detail ed description of substitutions, R-groups  and preferred embodiments
  MOD_RES (15)..(18): Any L- or D-natural or non-natural amino acid, and this range may     encompass 1 or 4 residues; see specification as filed for detailed  description of substitutions, R-groups and preferred emb
  c-term may be amidated

SEQ ID NO: 1608 - protein, 33 aa, Artificial Sequence; identical to SEQ ID NO: 1522
  Description of Artificial Sequence: Synthetic peptide
  MOD_RES (5)..(5): Any L- or D-natural amino acid and any non-natural amino acid; see  specification as filed for detail ed description of substitutions, R-groups  and preferred embodiments
  MOD_RES (8)..(9): Any L- or D-natural amino acid and any non-natural amino acid; see  specification as filed for detail ed description of substitutions, R-groups  and preferred embodiments
  MOD_RES (11)..(11): Any L- or D-natural amino acid and any non-natural amino acid; see  specification as filed for detail ed description of substitutions, R-groups  and preferred embodiments
  MOD_RES (15)..(18): Any L- or D-natural or non-natural amino acid, and this range may     encompass 1 or 4 residues; see specification as filed for detailed  description of substitutions, R-groups and preferred emb
  c-term may be amidated

SEQ ID NO: 1609 - protein, 33 aa, Artificial Sequence; identical to SEQ ID NO: 1523
  Description of Artificial Sequence: Synthetic peptide
  MOD_RES (6)..(6): Any L- or D-natural amino acid and any non-natural amino acid; see  specification as filed for detail ed description of substitutions, R-groups  and preferred embodiments
  MOD_RES (8)..(9): Any L- or D-natural amino acid and any non-natural amino acid; see  specification as filed for detail ed description of substitutions, R-groups  and preferred embodiments
  MOD_RES (11)..(11): Any L- or D-natural amino acid and any non-natural amino acid; see  specification as filed for detail ed description of substitutions, R-groups  and preferred embodiments
  MOD_RES (15)..(18): Any L- or D-natural or non-natural amino acid, and this range may     encompass 1 or 4 residues; see specification as filed for detailed  description of substitutions, R-groups and preferred emb
  c-term may be amidated

SEQ ID NO: 1610 - protein, 33 aa, Artificial Sequence; identical to SEQ ID NO: 1524
  Description of Artificial Sequence: Synthetic peptide
  MOD_RES (7)..(9): Any L- or D-natural amino acid and any non-natural amino acid; see  specification as filed for detail ed description of substitutions, R-groups  and preferred embodiments
  MOD_RES (11)..(11): Any L- or D-natural amino acid and any non-natural amino acid; see  specification as filed for detail ed description of substitutions, R-groups  and preferred embodiments
  MOD_RES (15)..(18): Any L- or D-natural or non-natural amino acid, and this range may     encompass 1 or 4 residues; see specification as filed for detailed  description of substitutions, R-groups and preferred emb
  c-term may be amidated

SEQ ID NO: 1611 - protein, 33 aa, Artificial Sequence; identical to SEQ ID NO: 1525
  Description of Artificial Sequence: Synthetic peptide
  MOD_RES (1)..(1): Any L- or D-natural amino acid and any non-natural amino acid; see  specification as filed for detail ed description of substitutions, R-groups  and preferred embodiments
  MOD_RES (8)..(9): Any L- or D-natural amino acid and any non-natural amino acid; see  specification as filed for detail ed description of substitutions, R-groups  and preferred embodiments
  MOD_RES (12)..(12): Any L- or D-natural amino acid and any non-natural amino acid; see  specification as filed for detail ed description of substitutions, R-groups  and preferred embodiments
  MOD_RES (15)..(18): Any L- or D-natural or non-natural amino acid, and this range may     encompass 1 or 4 residues; see specification as filed for detailed  description of substitutions, R-groups and preferred emb
  c-term may be amidated

SEQ ID NO: 1612 - protein, 33 aa, Artificial Sequence; identical to SEQ ID NO: 1526
  Description of Artificial Sequence: Synthetic peptide
  MOD_RES (2)..(2): Any L- or D-natural amino acid and any non-natural amino acid; see  specification as filed for detail ed description of substitutions, R-groups  and preferred embodiments
  MOD_RES (8)..(9): Any L- or D-natural amino acid and any non-natural amino acid; see  specification as filed for detail ed description of substitutions, R-groups  and preferred embodiments
  MOD_RES (12)..(12): Any L- or D-natural amino acid and any non-natural amino acid; see  specification as filed for detail ed description of substitutions, R-groups  and preferred embodiments
  MOD_RES (15)..(18): Any L- or D-natural or non-natural amino acid, and this range may     encompass 1 or 4 residues; see specification as filed for detailed  description of substitutions, R-groups and preferred emb
  c-term may be amidated

SEQ ID NO: 1613 - protein, 33 aa, Artificial Sequence; identical to SEQ ID NO: 1527
  Description of Artificial Sequence: Synthetic peptide
  MOD_RES (3)..(3): Any L- or D-natural amino acid and any non-natural amino acid; see  specification as filed for detail ed description of substitutions, R-groups  and preferred embodiments
  MOD_RES (8)..(9): Any L- or D-natural amino acid and any non-natural amino acid; see  specification as filed for detail ed description of substitutions, R-groups  and preferred embodiments
  MOD_RES (12)..(12): Any L- or D-natural amino acid and any non-natural amino acid; see  specification as filed for detail ed description of substitutions, R-groups  and preferred embodiments
  MOD_RES (15)..(18): Any L- or D-natural or non-natural amino acid, and this range may     encompass 1 or 4 residues; see specification as filed for detailed  description of substitutions, R-groups and preferred emb
  c-term may be amidated

SEQ ID NO: 1614 - protein, 33 aa, Artificial Sequence; identical to SEQ ID NO: 1528
  Description of Artificial Sequence: Synthetic peptide
  MOD_RES (4)..(4): Any L- or D-natural amino acid and any non-natural amino acid; see  specification as filed for detail ed description of substitutions, R-groups  and preferred embodiments
  MOD_RES (8)..(9): Any L- or D-natural amino acid and any non-natural amino acid; see  specification as filed for detail ed description of substitutions, R-groups  and preferred embodiments
  MOD_RES (12)..(12): Any L- or D-natural amino acid and any non-natural amino acid; see  specification as filed for detail ed description of substitutions, R-groups  and preferred embodiments
  MOD_RES (15)..(18): Any L- or D-natural or non-natural amino acid, and this range may     encompass 1 or 4 residues; see specification as filed for detailed  description of substitutions, R-groups and preferred emb
  c-term may be amidated

SEQ ID NO: 1615 - protein, 33 aa, Artificial Sequence; identical to SEQ ID NO: 1529
  Description of Artificial Sequence: Synthetic peptide
  MOD_RES (5)..(5): Any L- or D-natural amino acid and any non-natural amino acid; see  specification as filed for detail ed description of substitutions, R-groups  and preferred embodiments
  MOD_RES (8)..(9): Any L- or D-natural amino acid and any non-natural amino acid; see  specification as filed for detail ed description of substitutions, R-groups  and preferred embodiments
  MOD_RES (12)..(12): Any L- or D-natural amino acid and any non-natural amino acid; see  specification as filed for detail ed description of substitutions, R-groups  and preferred embodiments
  MOD_RES (15)..(18): Any L- or D-natural or non-natural amino acid, and this range may     encompass 1 or 4 residues; see specification as filed for detailed  description of substitutions, R-groups and preferred emb
  c-term may be amidated

SEQ ID NO: 1616 - protein, 33 aa, Artificial Sequence; identical to SEQ ID NO: 1530
  Description of Artificial Sequence: Synthetic peptide
  MOD_RES (6)..(6): Any L- or D-natural amino acid and any non-natural amino acid; see  specification as filed for detail ed description of substitutions, R-groups  and preferred embodiments
  MOD_RES (8)..(9): Any L- or D-natural amino acid and any non-natural amino acid; see  specification as filed for detail ed description of substitutions, R-groups  and preferred embodiments
  MOD_RES (12)..(12): Any L- or D-natural amino acid and any non-natural amino acid; see  specification as filed for detail ed description of substitutions, R-groups  and preferred embodiments
  MOD_RES (15)..(18): Any L- or D-natural or non-natural amino acid, and this range may     encompass 1 or 4 residues; see specification as filed for detailed  description of substitutions, R-groups and preferred emb
  c-term may be amidated

SEQ ID NO: 1617 - protein, 33 aa, Artificial Sequence; identical to SEQ ID NO: 1531
  Description of Artificial Sequence: Synthetic peptide
  MOD_RES (7)..(9): Any L- or D-natural amino acid and any non-natural amino acid; see  specification as filed for detail ed description of substitutions, R-groups  and preferred embodiments
  MOD_RES (12)..(12): Any L- or D-natural amino acid and any non-natural amino acid; see  specification as filed for detail ed description of substitutions, R-groups  and preferred embodiments
  MOD_RES (15)..(18): Any L- or D-natural or non-natural amino acid, and this range may     encompass 1 or 4 residues; see specification as filed for detailed  description of substitutions, R-groups and preferred emb
  c-term may be amidated

SEQ ID NO: 1618 - protein, 33 aa, Artificial Sequence; identical to SEQ ID NO: 1532
  Description of Artificial Sequence: Synthetic peptide
  MOD_RES (1)..(1): Any L- or D-natural amino acid and any non-natural amino acid; see  specification as filed for detail ed description of substitutions, R-groups  and preferred embodiments
  MOD_RES (8)..(9): Any L- or D-natural amino acid and any non-natural amino acid; see  specification as filed for detail ed description of substitutions, R-groups  and preferred embodiments
  MOD_RES (13)..(13): Any L- or D-natural amino acid and any non-natural amino acid; see  specification as filed for detail ed description of substitutions, R-groups  and preferred embodiments
  MOD_RES (15)..(18): Any L- or D-natural or non-natural amino acid, and this range may     encompass 1 or 4 residues; see specification as filed for detailed  description of substitutions, R-groups and preferred emb
  c-term may be amidated

SEQ ID NO: 1619 - protein, 33 aa, Artificial Sequence; identical to SEQ ID NO: 1533
  Description of Artificial Sequence: Synthetic peptide
  MOD_RES (2)..(2): Any L- or D-natural amino acid and any non-natural amino acid; see  specification as filed for detail ed description of substitutions, R-groups  and preferred embodiments
  MOD_RES (8)..(9): Any L- or D-natural amino acid and any non-natural amino acid; see  specification as filed for detail ed description of substitutions, R-groups  and preferred embodiments
  MOD_RES (13)..(13): Any L- or D-natural amino acid and any non-natural amino acid; see  specification as filed for detail ed description of substitutions, R-groups  and preferred embodiments
  MOD_RES (15)..(18): Any L- or D-natural or non-natural amino acid, and this range may     encompass 1 or 4 residues; see specification as filed for detailed  description of substitutions, R-groups and preferred emb
  c-term may be amidated

SEQ ID NO: 1620 - protein, 33 aa, Artificial Sequence; identical to SEQ ID NO: 1534
  Description of Artificial Sequence: Synthetic peptide
  MOD_RES (3)..(3): Any L- or D-natural amino acid and any non-natural amino acid; see  specification as filed for detail ed description of substitutions, R-groups  and preferred embodiments
  MOD_RES (8)..(9): Any L- or D-natural amino acid and any non-natural amino acid; see  specification as filed for detail ed description of substitutions, R-groups  and preferred embodiments
  MOD_RES (13)..(13): Any L- or D-natural amino acid and any non-natural amino acid; see  specification as filed for detail ed description of substitutions, R-groups  and preferred embodiments
  MOD_RES (15)..(18): Any L- or D-natural or non-natural amino acid, and this range may     encompass 1 or 4 residues; see specification as filed for detailed  description of substitutions, R-groups and preferred emb
  c-term may be amidated

SEQ ID NO: 1621 - protein, 33 aa, Artificial Sequence; identical to SEQ ID NO: 1535
  Description of Artificial Sequence: Synthetic peptide
  MOD_RES (4)..(4): Any L- or D-natural amino acid and any non-natural amino acid; see  specification as filed for detail ed description of substitutions, R-groups  and preferred embodiments
  MOD_RES (8)..(9): Any L- or D-natural amino acid and any non-natural amino acid; see  specification as filed for detail ed description of substitutions, R-groups  and preferred embodiments
  MOD_RES (13)..(13): Any L- or D-natural amino acid and any non-natural amino acid; see  specification as filed for detail ed description of substitutions, R-groups  and preferred embodiments
  MOD_RES (15)..(18): Any L- or D-natural or non-natural amino acid, and this range may     encompass 1 or 4 residues; see specification as filed for detailed  description of substitutions, R-groups and preferred emb
  c-term may be amidated

SEQ ID NO: 1622 - protein, 33 aa, Artificial Sequence; identical to SEQ ID NO: 1536
  Description of Artificial Sequence: Synthetic peptide
  MOD_RES (5)..(5): Any L- or D-natural amino acid and any non-natural amino acid; see  specification as filed for detail ed description of substitutions, R-groups  and preferred embodiments
  MOD_RES (8)..(9): Any L- or D-natural amino acid and any non-natural amino acid; see  specification as filed for detail ed description of substitutions, R-groups  and preferred embodiments
  MOD_RES (13)..(13): Any L- or D-natural amino acid and any non-natural amino acid; see  specification as filed for detail ed description of substitutions, R-groups  and preferred embodiments
  MOD_RES (15)..(18): Any L- or D-natural or non-natural amino acid, and this range may     encompass 1 or 4 residues; see specification as filed for detailed  description of substitutions, R-groups and preferred emb
  c-term may be amidated

SEQ ID NO: 1623 - protein, 33 aa, Artificial Sequence; identical to SEQ ID NO: 1537
  Description of Artificial Sequence: Synthetic peptide
  MOD_RES (6)..(6): Any L- or D-natural amino acid and any non-natural amino acid; see  specification as filed for detail ed description of substitutions, R-groups  and preferred embodiments
  MOD_RES (8)..(9): Any L- or D-natural amino acid and any non-natural amino acid; see  specification as filed for detail ed description of substitutions, R-groups  and preferred embodiments
  MOD_RES (13)..(13): Any L- or D-natural amino acid and any non-natural amino acid; see  specification as filed for detail ed description of substitutions, R-groups  and preferred embodiments
  MOD_RES (15)..(18): Any L- or D-natural or non-natural amino acid, and this range may     encompass 1 or 4 residues; see specification as filed for detailed  description of substitutions, R-groups and preferred emb
  c-term may be amidated

SEQ ID NO: 1624 - protein, 33 aa, Artificial Sequence; identical to SEQ ID NO: 1538
  Description of Artificial Sequence: Synthetic peptide
  MOD_RES (7)..(9): Any L- or D-natural amino acid and any non-natural amino acid; see  specification as filed for detail ed description of substitutions, R-groups  and preferred embodiments
  MOD_RES (13)..(13): Any L- or D-natural amino acid and any non-natural amino acid; see  specification as filed for detail ed description of substitutions, R-groups  and preferred embodiments
  MOD_RES (15)..(18): Any L- or D-natural or non-natural amino acid, and this range may     encompass 1 or 4 residues; see specification as filed for detailed  description of substitutions, R-groups and preferred emb
  c-term may be amidated

SEQ ID NO: 1625 - protein, 33 aa, Artificial Sequence; identical to SEQ ID NO: 1539
  Description of Artificial Sequence: Synthetic peptide
  MOD_RES (1)..(1): Any L- or D-natural amino acid and any non-natural amino acid; see  specification as filed for detail ed description of substitutions, R-groups  and preferred embodiments
  MOD_RES (8)..(9): Any L- or D-natural amino acid and any non-natural amino acid; see  specification as filed for detail ed description of substitutions, R-groups  and preferred embodiments
  MOD_RES (14)..(14): Any L- or D-natural amino acid and any non-natural amino acid; see  specification as filed for detail ed description of substitutions, R-groups  and preferred embodiments
  MOD_RES (15)..(18): Any L- or D-natural or non-natural amino acid, and this range may     encompass 1 or 4 residues; see specification as filed for detailed  description of substitutions, R-groups and preferred emb
  c-term may be amidated

SEQ ID NO: 1626 - protein, 33 aa, Artificial Sequence; identical to SEQ ID NO: 1540
  Description of Artificial Sequence: Synthetic peptide
  MOD_RES (2)..(2): Any L- or D-natural amino acid and any non-natural amino acid; see  specification as filed for detail ed description of substitutions, R-groups  and preferred embodiments
  MOD_RES (8)..(9): Any L- or D-natural amino acid and any non-natural amino acid; see  specification as filed for detail ed description of substitutions, R-groups  and preferred embodiments
  MOD_RES (14)..(14): Any L- or D-natural amino acid and any non-natural amino acid; see  specification as filed for detail ed description of substitutions, R-groups  and preferred embodiments
  MOD_RES (15)..(18): Any L- or D-natural or non-natural amino acid, and this range may     encompass 1 or 4 residues; see specification as filed for detailed  description of substitutions, R-groups and preferred emb
  c-term may be amidated

SEQ ID NO: 1627 - protein, 33 aa, Artificial Sequence; identical to SEQ ID NO: 1541
  Description of Artificial Sequence: Synthetic peptide
  MOD_RES (3)..(3): Any L- or D-natural amino acid and any non-natural amino acid; see  specification as filed for detail ed description of substitutions, R-groups  and preferred embodiments
  MOD_RES (8)..(9): Any L- or D-natural amino acid and any non-natural amino acid; see  specification as filed for detail ed description of substitutions, R-groups  and preferred embodiments
  MOD_RES (14)..(14): Any L- or D-natural amino acid and any non-natural amino acid; see  specification as filed for detail ed description of substitutions, R-groups  and preferred embodiments
  MOD_RES (15)..(18): Any L- or D-natural or non-natural amino acid, and this range may     encompass 1 or 4 residues; see specification as filed for detailed  description of substitutions, R-groups and preferred emb
  c-term may be amidated

SEQ ID NO: 1628 - protein, 33 aa, Artificial Sequence; identical to SEQ ID NO: 1542
  Description of Artificial Sequence: Synthetic peptide
  MOD_RES (4)..(4): Any L- or D-natural amino acid and any non-natural amino acid; see  specification as filed for detail ed description of substitutions, R-groups  and preferred embodiments
  MOD_RES (8)..(9): Any L- or D-natural amino acid and any non-natural amino acid; see  specification as filed for detail ed description of substitutions, R-groups  and preferred embodiments
  MOD_RES (14)..(14): Any L- or D-natural amino acid and any non-natural amino acid; see  specification as filed for detail ed description of substitutions, R-groups  and preferred embodiments
  MOD_RES (15)..(18): Any L- or D-natural or non-natural amino acid, and this range may     encompass 1 or 4 residues; see specification as filed for detailed  description of substitutions, R-groups and preferred emb
  c-term may be amidated

SEQ ID NO: 1629 - protein, 33 aa, Artificial Sequence; identical to SEQ ID NO: 1543
  Description of Artificial Sequence: Synthetic peptide
  MOD_RES (5)..(5): Any L- or D-natural amino acid and any non-natural amino acid; see  specification as filed for detail ed description of substitutions, R-groups  and preferred embodiments
  MOD_RES (8)..(9): Any L- or D-natural amino acid and any non-natural amino acid; see  specification as filed for detail ed description of substitutions, R-groups  and preferred embodiments
  MOD_RES (14)..(14): Any L- or D-natural amino acid and any non-natural amino acid; see  specification as filed for detail ed description of substitutions, R-groups  and preferred embodiments
  MOD_RES (15)..(18): Any L- or D-natural or non-natural amino acid, and this range may     encompass 1 or 4 residues; see specification as filed for detailed  description of substitutions, R-groups and preferred emb
  c-term may be amidated

SEQ ID NO: 1630 - protein, 33 aa, Artificial Sequence; identical to SEQ ID NO: 1544
  Description of Artificial Sequence: Synthetic peptide
  MOD_RES (6)..(6): Any L- or D-natural amino acid and any non-natural amino acid; see  specification as filed for detail ed description of substitutions, R-groups  and preferred embodiments
  MOD_RES (8)..(9): Any L- or D-natural amino acid and any non-natural amino acid; see  specification as filed for detail ed description of substitutions, R-groups  and preferred embodiments
  MOD_RES (14)..(14): Any L- or D-natural amino acid and any non-natural amino acid; see  specification as filed for detail ed description of substitutions, R-groups  and preferred embodiments
  MOD_RES (15)..(18): Any L- or D-natural or non-natural amino acid, and this range may     encompass 1 or 4 residues; see specification as filed for detailed  description of substitutions, R-groups and preferred emb
  c-term may be amidated

SEQ ID NO: 1631 - protein, 33 aa, Artificial Sequence; identical to SEQ ID NO: 1545
  Description of Artificial Sequence: Synthetic peptide
  MOD_RES (7)..(9): Any L- or D-natural amino acid and any non-natural amino acid; see  specification as filed for detail ed description of substitutions, R-groups  and preferred embodiments
  MOD_RES (14)..(14): Any L- or D-natural amino acid and any non-natural amino acid; see  specification as filed for detail ed description of substitutions, R-groups  and preferred embodiments
  MOD_RES (15)..(18): Any L- or D-natural or non-natural amino acid, and this range may     encompass 1 or 4 residues; see specification as filed for detailed  description of substitutions, R-groups and preferred emb
  c-term may be amidated

SEQ ID NO: 1632 - protein, 35 aa, Artificial Sequence
  Description of Artificial Sequence: Synthetic peptide
  c-term may be amidated
SAKELRCQCIKTYSKGGGGNWVQRVVEKFLKRAEN

SEQ ID NO: 1633 - protein, 33 aa, Artificial Sequence
  Description of Artificial Sequence: Synthetic peptide
  c-term may be amidated
SAKELRCQCIKTYGGGGNWVQRVVEKFLKRAEN

SEQ ID NO: 1634 - protein, 31 aa, Artificial Sequence
  Description of Artificial Sequence: Synthetic peptide
  c-term may be amidated
SAKELRCQCIKGGGGNWVQRVVEKFLKRAEN

SEQ ID NO: 1635 - protein, 10 aa, Artificial Sequence
  Description of Artificial Sequence: Synthetic peptide
  c-term may be amidated
KSMQVPFSRA

SEQ ID NO: 1636 - protein, 15 aa, Artificial Sequence
  Description of Artificial Sequence: Synthetic peptide
  c-term may be amidated
AFSFAEQEIPLRAIL

SEQ ID NO: 1637 - protein, 23 aa, Artificial Sequence
  Description of Artificial Sequence: Synthetic peptide
  c-term may be amidated
AFSFAEQEIPLRAILCYRNTSSI

SEQ ID NO: 1638 - protein, 24 aa, Artificial Sequence
  Description of Artificial Sequence: Synthetic peptide
  c-term may be amidated
AYRNTSSICSNEGLIFKLKRGKEA

SEQ ID NO: 1639 - protein, 24 aa, Artificial Sequence
  Description of Artificial Sequence: Synthetic peptide
  c-term may be amidated
AALDTVGWVQRHRKMLRHCPSKRK

SEQ ID NO: 1640 - protein, 4 aa, Artificial Sequence
  Description of Artificial Sequence: Synthetic peptide
GGGG

SEQ ID NO: 1641 - protein, 30 aa, Artificial Sequence
  Description of Artificial Sequence: Synthetic peptide
  MOD_RES (17)..(17): 11-amino undecanoic acid
VPLSRTVRCTCISISNXLKAVSKEMSKRSP

SEQ ID NO: 1642 - protein, 30 aa, Artificial Sequence
  Description of Artificial Sequence: Synthetic peptide
  MOD_RES (17)..(17): 11-amino undecanoic acid
VPLSRTVRATFISISNXLKAVSKEMSKRSP

SEQ ID NO: 1643 - protein, 30 aa, Artificial Sequence
  Description of Artificial Sequence: Synthetic peptide
  MOD_RES (16)..(16): 11-amino undecanoic acid
VPLSRTPRCTCISISXESKAIKNLLKAVSK

SEQ ID NO: 1644 - protein, 30 aa, Artificial Sequence
  Description of Artificial Sequence: Synthetic peptide
  MOD_RES (16)..(16): 11-amino undecanoic acid
VPLSRTVRSTSISISXESKAIENLLKAVSK

SEQ ID NO: 1645 - protein, 30 aa, Artificial Sequence
  Description of Artificial Sequence: Synthetic peptide
  MOD_RES (16)..(16): 11-amino undecanoic acid
VPLSRTVRSTSISISXESKAIKNLLEAVSK

SEQ ID NO: 1646 - protein, 15 aa, Artificial Sequence
  Description of Artificial Sequence: Synthetic peptide
  c-term may be amidated
VPLSRTVRCTCISIS

SEQ ID NO: 1647 - protein, 6 aa, Artificial Sequence
  Description of Artificial Sequence: Synthetic peptide
  c-term may be amidated
LKAVSK
